(19) United States
(12) Patent Application Publication
(10) Pub. No.: US 2022/0298494 A1
(43) Pub. Date: Sep. 22, 2022

(54) ENZYMES WITH RUVC DOMAINS

(71) Applicant: METAGENOMI IP TECHNOLOGIES, LLC, Emeryville, CA (US)

(72) Inventors: Brian THOMAS, Emeryville, CA (US); Christopher BROWN, Emeryville, CA (US); Rose KANTOR, Emeryville, CA (US); Audra DEVOTO, Emeryville, CA (US); Cristina BUTTERFIELD, Emeryville, CA (US); Lisa ALEXANDER, Emeryville, CA (US); Daniela S.A. GOLTSMAN, Emeryville, CA (US); Jason LIU, Emeryville, CA (US)

(21) Appl. No.: 17/431,135

(22) PCT Filed: Feb. 14, 2020
(86) PCT No.: PCT/US2020/018353

§ 371 Date: Aug. 13, 2021

Related U.S. Application Data
(60) Provisional application No. 62/805,893, filed on Feb. 14, 2019.

(51) Int. Cl. C12N 9/22; C12N 15/10; C12N 15/11; C12N 15/90; C12N 15/63

(52) U.S. Cl. CPC C12N 9/22; C12N 15/102; C12N 15/11; C12N 15/90; C12N 15/63; C12N 2310/20; C12N 2800/80

(57) ABSTRACT

The present disclosure provides for endonuclease enzymes having distinguishing domain features, as well as methods of using such enzymes or variants thereof.

### CROSS-REFERENCE

[0001] This application claims the benefit of U.S. Provisional Application No. 62/805,893, filed Feb. 14, 2019 and titled “MG6 ENZYMES WITH RUVC DOMAINS” which is entirely incorporated herein by reference.

### BACKGROUND

[0002] Cas enzymes along with their associated Clustered Regularly Interspaced Short Palindromic Repeats (CRISPR) guide ribonucleic acids (RNAs) appear to be a pervasive (˜45% of bacteria, ˜84% of archaea) component of prokaryotic immune systems, serving to protect such microorganisms against non-self nucleic acids, such as infectious viruses and plasmids by CRISPR-RNA guided nucleic acid cleavage. While the deoxyribonucleic acid (DNA) elements encoding CRISPR RNA elements may be relatively conserved in structure and length, their CRISPR-associated (Cas) proteins are highly diverse, containing a wide variety of nucleic acid-interacting domains. While CRISPR DNA elements have been observed as early as 1987, the programmable endonuclease cleavage ability of CRISPR/Cas complexes has only been recognized relatively recently, leading to the use of recombinant CRISPR/Cas systems in diverse DNA manipulation and gene editing applications.

### SEQUENCE LISTING

[0003] The instant application contains a Sequence Listing which has been submitted electronically in ASCII format and is hereby incorporated by reference in its entirety. Said ASCII copy, created on Feb. 14, 2020, is named 55921-708_601_SL.txt and is 786 KB in size.

### SUMMARY

[0004] In some aspects, the present disclosure provides for an engineered nuclease system comprising: (a) an endonuclease comprising a RuvC_III domain and an HNH domain, wherein the endonuclease is derived from an uncultivated microorganism, and wherein the endonuclease is a class 2, type II Cas endonuclease; and (b) an engineered guide ribonucleic acid structure configured to form a complex with the endonuclease comprising: (i) a guide ribonucleic acid sequence configured to hybridize to a target deoxyribonucleic acid sequence; and (ii) a tracr ribonucleic acid sequence configured to bind to the endonuclease. In some embodiments, the RuvC_III domain comprises a sequence with at least 70%, at least 75%, at least 80% or at least 90% sequence identity to any one of SEQ ID NOs: 45-88 or SEQ ID NOs: 246-262. In some aspects, the present disclosure provides for an engineered nuclease system comprising: (a) an endonuclease comprising a RuvC_III domain having at least 75% sequence identity to any one of SEQ ID NOs: 45-88 or SEQ ID NOs: 246-262; and (b) an engineered guide ribonucleic acid structure configured to form a complex with the endonuclease comprising: (i) a guide ribonucleic acid sequence configured to hybridize to a target deoxyribonucleic acid sequence; and (ii) a tracr ribonucleic acid sequence configured to bind to the endonuclease. In some aspects, the present disclosure provides for an engineered nuclease system comprising: (a) an endonuclease configured to bind to a protospacer adjacent motif (PAM) sequence comprising SEQ ID NOs: 149-158, wherein the endonuclease is a class 2, type II Cas endonuclease; and (b) an engineered guide ribonucleic acid structure configured to form a complex with the endonuclease comprising: (i) a guide ribonucleic acid sequence configured to hybridize to a target deoxyribonucleic acid sequence; and (ii) a tracr ribonucleic acid sequence configured to bind to the endonuclease. In some embodiments, the endonuclease is not a Cas9 endonuclease, a Cas14 endonuclease, a Cas12a endonuclease, a Cas12b endonuclease, a Cas 12c endonuclease, a Cas12d endonuclease, a Cas12e endonuclease, a Cas13a endonuclease, a Cas13b endonuclease, a Cas13c endonuclease, or a Cas 13d endonuclease. In some embodiments, the endonuclease has less than 80% identity to a Cas9 endonuclease. In some embodiments, the endonuclease further comprises an HNH domain. In some embodiments, the tracr ribonucleic acid sequence comprises a sequence with at least 80% sequence identity to about 60 to 90 consecutive nucleotides selected from any one of SEQ ID NOs: 138-148 or SEQ ID NO: 280. In some aspects, the present disclosure provides for an engineered nuclease system comprising, (a) an engineered guide ribonucleic acid structure comprising: a guide ribonucleic acid sequence configured to hybridize to a target deoxyribonucleic acid sequence; and a tracr ribonucleic acid sequence configured to bind to an endonuclease, wherein the tracr ribonucleic acid sequence comprises a sequence with at least 80% sequence identity to about 60 to 90 consecutive nucleotides selected from any one of SEQ ID NOs: 138-148 or SEQ ID NO: 280; and (b) a class 2, type II Cas endonuclease configured to bind to the engineered guide ribonucleic acid. In some embodiments, the endonuclease is configured to bind to a protospacer adjacent motif (PAM) sequence selected from the group comprising SEQ ID NOs: 149-158. In some embodiments, the engineered guide ribonucleic acid structure comprises at least two ribonucleic acid polynucleotides. In some embodiments, the engineered guide ribonucleic acid structure comprises one ribonucleic acid polynucleotide comprising the guide ribonucleic acid sequence and the tracr ribonucleic acid sequence. In some embodiments, the guide ribonucleic acid sequence is complementary to a prokaryotic, bacterial, eukaryotic, fungal, plant, mammalian, or human genomic sequence. In some embodiments, the guide ribonucleic acid sequence is 15-23 nucleotides in length. In some embodiments, the endonuclease comprises one or more nuclear localization sequences (NLSs) proximal to an N- or C-terminus of the endonuclease. In some embodiments, the NLS comprises a sequence selected from the group consisting of SEQ ID NO: 180-195. In some embodiments, the engineered nuclease system further comprises a single- or double-stranded DNA repair template comprising from 5′ to 3′: a first homology arm comprising a sequence of at least 20 nucleotides 5′ to the target deoxyribonucleic acid sequence, a synthetic DNA sequence of at least 10 nucleotides, and a second homology arm comprising a sequence of at least 20 nucleotides 3′ to the target sequence. In some embodiments, the first or second homology arm comprises a sequence of at least 40, 80, 120, 150, 200, 300, 500, or 1,000 nucleotides. In some embodiments, the system further comprises a source of Mg²⁺. In some embodiments, the endonuclease and the tracr ribonucleic acid sequence are derived from distinct bacterial species within a same phylum. In some embodiments, the endonuclease is derived from a bacterium belonging to genus Dermabacter. In some embodiments, the endonuclease is derived from a bacterium belonging to Phylum Verrucomicrobia, Phylum Candidatus Peregrinibacteria, or Phylum Candidatus Melainabacteria. In some embodiments, the HNH domain comprises a sequence with at least 70% or at least 80% identity to any one of SEQ ID NOs: 89-132 or SEQ ID NOs: 263-279. In some embodiments, the endonuclease comprises SEQ ID NOs: 1-44 or SEQ ID NOs: 229-245 or a variant thereof having at least 55% identity thereto. In some embodiments, the endonuclease comprises a sequence at least 70%, 80%, or 90% identical to a sequence selected from the group consisting of SEQ ID NO: 46 or SEQ ID NOs: 46-47. In some embodiments, the endonuclease comprises a sequence at least 70%, 80%, or 90% identical to a sequence selected from the group consisting of SEQ ID NO: 90 or SEQ ID NOs: 90-91. In some embodiments, the endonuclease comprises at least 1, at least 2, at least 3, at least 4, or at least 5 peptide motifs selected from the group consisting of SEQ ID NOs: 214-221. In some embodiments, the endonuclease comprises a sequence at least 70%, 80%, or 90% identical to a sequence selected from the group consisting of SEQ ID NO: 2 or SEQ ID NOs: 2-3. In some embodiments, the guide RNA structure comprises a sequence at least 70%, 80%, or 90% identical to a sequence selected from the group consisting of SEQ ID NO: 138 or SEQ ID NO: 133. In some embodiments, the guide RNA structure comprises a tracr ribonucleic acid sequence comprising a hairpin comprising at least 8, at least 10, or at least 12 base-paired ribonucleotides. In some embodiments, the endonuclease is configured to bind to a PAM comprising a sequence selected from the group consisting of SEQ ID NO: 149 and SEQ ID NO: 154. In some embodiments: (a) the endonuclease comprises a sequence at least 70%, 80%, or 90% identical to SEQ ID NO: 46; (b) the guide RNA structure comprises a sequence at least 70%, 80%, or 90% identical to SEQ ID NO: 133 or SEQ ID NO: 138; and (c) the endonuclease is configured to bind to a PAM comprising SEQ ID NO: 149 or SEQ ID NO: 154. In some embodiments, the endonuclease comprises a sequence at least 70%, 80%, or 90% identical to a sequence selected from the group consisting of SEQ ID NO: 48 or SEQ ID NOs: 48-71. In some embodiments, the endonuclease comprises a sequence at least 70%, 80%, or 90% identical to a sequence selected from the group consisting of SEQ ID NO: 92 or SEQ ID NOs: 92-115. In some embodiments, the endonuclease comprises SEQ ID NO: 222. In some embodiments, the endonuclease comprises a sequence at least 70%, 80%, or 90% identical to a sequence selected from the group consisting of SEQ ID NO: 4 or SEQ ID NOs: 4-27. In some embodiments, the guide RNA structure comprises a sequence at least 70%, 80%, or 90% identical to a sequence selected from the group consisting of SEQ ID NO: 139, SEQ ID NOs: 139-143, or SEQ ID NO: 134. In some embodiments, the endonuclease is configured to bind to a PAM comprising SEQ ID NO: 150 or SEQ ID NO: 155. In some embodiments: (a) the endonuclease comprises a sequence at least 70%, 80%, or 90% identical to SEQ ID NO: 48; (b) the guide RNA structure comprises a sequence at least 70%, 80%, or 90% identical to SEQ ID NO: 134 or SEQ ID NO: 139; and (c) the endonuclease is configured to bind to a PAM comprising SEQ ID NO: 150 or SEQ ID NO: 155. In some embodiments, the endonuclease comprises a sequence at least 70%, 80%, or 90% identical to a sequence selected from the group consisting of SEQ ID NO: 72, SEQ ID NOs: 72-83, and SEQ ID NOs: 246-253. In some embodiments, the endonuclease comprises a sequence at least 70%, 80%, or 90% identical to a sequence selected from the group consisting of SEQ ID NO: 116, SEQ ID NOs: 116-127, and SEQ ID NOs: 263-270. In some embodiments, the endonuclease comprises at least 1, at least 2, at least 3, at least 4, or at least 5 peptide motifs selected from the group consisting of SEQ ID NO: 223-225. In some embodiments, the endonuclease comprises a sequence at least 70%, 80%, or 90% identical to a sequence selected from the group consisting of SEQ ID NO: 28, SEQ ID NOs: 28-39, and SEQ ID NOs: 229-236. In some embodiments, the guide RNA structure comprises a sequence at least 70%, 80%, or 90% identical to a sequence selected from the group consisting of SEQ ID NO: 144, SEQ ID NOs: 144-146, and SEQ ID NO: 135. In some embodiments, the endonuclease is configured to bind to a PAM comprising a sequence selected from the group consisting of SEQ ID NO: 151 and SEQ ID NO: 156. In some embodiments: (a) the endonuclease comprises a sequence at least 70%, 80%, or 90% identical to SEQ ID NO: 72; (b) the guide RNA structure comprises a sequence at least 70%, 80%, or 90% identical to SEQ ID NO: 135 or SEQ ID NO: 144; and (c) the endonuclease is configured to bind to a PAM comprising SEQ ID NO: 151 or SEQ ID NO: 156. In some embodiments, the endonuclease comprises a sequence at least 70%, 80%, or 90% identical to a sequence selected from the group consisting of SEQ ID NO: 84, SEQ ID NOs: 84-86, and SEQ ID NOs: 254-262. In some embodiments, the endonuclease comprises a sequence at least 70%, 80%, or 90% identical to a sequence selected from the group consisting of SEQ ID NO: 128, SEQ ID NOs: 128-130, and SEQ ID NOs: 271-279. In some embodiments, the endonuclease comprises a sequence at least 70%, 80%, or 90% identical to a sequence selected from the group consisting of SEQ ID NO: 40, SEQ ID NOs: 40-42, and SEQ ID NOs: 237-245. In some embodiments, the guide RNA structure comprises a sequence at least 70%, 80%, or 90% identical to a sequence selected from the group consisting of SEQ ID NO: 147, SEQ ID NO: 280, or SEQ ID NO: 136. In some embodiments, the endonuclease is configured to bind to a PAM comprising a sequence selected from the group consisting of SEQ ID NO: 152 and SEQ ID NO: 157. In some embodiments: (a) the endonuclease comprises a sequence at least 70%, 80%, or 90% identical to SEQ ID NO: 84; (b) the guide RNA structure comprises a sequence at least 70%, 80%, or 90% identical to SEQ ID NO: 136 or SEQ ID NO: 147; and (c) the endonuclease is configured to bind to a PAM comprising SEQ ID NO: 152 or SEQ ID NO: 157. In some embodiments, the endonuclease comprises a sequence at least 70%, 80%, or 90% identical to a sequence selected from the group consisting of SEQ ID NO: 87, or SEQ ID NOs: 87-88. In some embodiments, the endonuclease comprises a sequence at least 70%, 80%, or 90% identical to a sequence selected from the group consisting of SEQ ID NO: 131 or SEQ ID NOs: 131-132. In some embodiments, the endonuclease comprises at least 1, at least 2, at least 3, at least 4, or at least 5 peptide motifs selected from the group consisting of SEQ ID NO: 226-228. In some embodiments, the endonuclease comprises a sequence at least 70%, 80%, or 90% identical to a sequence selected from the group consisting of SEQ ID NO: 43 or SEQ ID NOs: 43-44. In some embodiments, the guide RNA structure comprises a tracr ribonucleic acid sequence comprising at least two hairpins comprising less than 5 base-paired ribonucleotides. In some embodiments, the guide RNA structure comprises a sequence at least 70%, 80%, or 90% identical to a sequence selected from the group consisting of SEQ ID NO: 148 or SEQ ID NO: 137. In some embodiments, the endonuclease is configured to bind to a PAM comprising a sequence selected from the group consisting of SEQ ID NO: 153 and SEQ ID NO: 158. In some embodiments: (a) the endonuclease comprises a sequence at least 70%, 80%, or 90% identical to SEQ ID NO: 87; (b) the guide RNA structure comprises a sequence at least 70%, 80%, or 90% identical to SEQ ID NO: 137 or SEQ ID NO: 148; and (c) the endonuclease is configured to bind to a PAM comprising SEQ ID NO: 153 or SEQ ID NO: 158. In some embodiments, the sequence identity is determined by a BLASTP, CLUSTALW, MUSCLE, MAFFT, or Smith-Waterman homology search algorithm. In some embodiments, the sequence identity is determined by the BLASTP homology search algorithm using parameters of a wordlength (W) of 3, an expectation (E) of 10, and a BLOSUM62 scoring matrix setting gap costs at existence of 11, extension of 1, and using a conditional compositional score matrix adjustment.

[0005] In some aspects, the present disclosure provides for an engineered guide ribonucleic acid polynucleotide comprising: (a) a DNA-targeting segment comprising a nucleotide sequence that is complementary to a target sequence in a target DNA molecule; and (b) a protein-binding segment comprising two complementary stretches of nucleotides that hybridize to form a double-stranded RNA (dsRNA) duplex, wherein the two complementary stretches of nucleotides are covalently linked to one another with intervening nucleotides, and wherein the engineered guide ribonucleic acid polynucleotide is capable of forming a complex with an endonuclease comprising a RuvC_III domain having at least 75% sequence identity to any one of SEQ ID NOs: 45-88 or SEQ ID NOs: 246-262 and targeting the complex to the target sequence of the target DNA molecule. In some embodiments, the DNA-targeting segment is positioned 5′ of both of the two complementary stretches of nucleotides. In some embodiments: (a) the protein binding segment comprises a sequence having at least 70%, at least 80%, or at least 90% identity to a sequence selected from the group consisting of SEQ ID NO: 138; (b) the protein binding segment comprises a sequence having at least 70%, at least 80%, or at least 90% identity to a sequence selected from the group consisting of SEQ ID NO: 139 or SEQ ID NOs: 139-143; (c) the protein binding segment comprises a sequence having at least 70%, at least 80%, or at least 90% identity to a sequence selected from the group consisting of SEQ ID NO: 144 or SEQ ID NOs: 144-146; (d) the protein binding segment comprises a sequence having at least 70%, at least 80%, or at least 90% identity to a sequence selected from the group consisting of SEQ ID NO: 147; or (e) the protein binding segment comprises a sequence having at least 70%, at least 80%, or at least 90% identity to a sequence selected from the group consisting of SEQ ID NO: 148. In some embodiments: (a) the guide ribonucleic acid polynucleotide comprises a tracr ribonucleic acid comprising a hairpin comprising at least 8, at least 10, or at least 12 base-paired ribonucleotides; or (b) the guide ribonucleic acid polynucleotide comprises a tracr ribonucleic acid sequence comprising at least two hairpins comprising less than 5 base-paired ribonucleotides.

[0006] In some aspects, the present disclosure provides for a deoxyribonucleic acid polynucleotide encoding the engineered guide ribonucleic acid polynucleotide described above.

[0007] In some aspects, the present disclosure provides for a nucleic acid comprising an engineered nucleic acid sequence optimized for expression in an organism, wherein the nucleic acid encodes an endonuclease comprising a RuvC_III domain and an HNH domain, wherein the endonuclease is a class 2, type II Cas endonuclease, and wherein the endonuclease is derived from an uncultivated microorganism.

[0008] In some aspects, the present disclosure provides for a nucleic acid comprising an engineered nucleic acid sequence optimized for expression in an organism, wherein the nucleic acid encodes an endonuclease comprising a RuvC_III domain having at least 70% sequence identity to any one of SEQ ID NOs: 45-88. In some embodiments, the endonuclease comprises an HNH domain having at least 70% or at least 80% sequence identity to any one of SEQ ID NOs: 89-132. In some embodiments, the endonuclease comprises SEQ ID NOs: 170-179 or a variant thereof having at least 70% sequence identity thereto. In some embodiments, the endonuclease comprises a sequence encoding one or more nuclear localization sequences (NLSs) proximal to an N- or C-terminus of the endonuclease. In some embodiments, the NLS comprises a sequence selected from SEQ ID NOs: 180-195. In some embodiments, the organism is prokaryotic, bacterial, eukaryotic, fungal, plant, mammalian, rodent, or human. In some embodiments, the organism is E. coli, and: (a) the nucleic acid sequence has at least 70%, 80%, or 90% identity to SEQ ID NO: 170; (b) the nucleic acid sequence has at least 70%, 80%, or 90% identity to a sequence selected from the group consisting of SEQ ID NOs: 171-172; (c) the nucleic acid sequence has at least 70%, 80%, or 90% identity to SEQ ID NO: 173; (d) the nucleic acid sequence has at least 70%, 80%, or 90% identity to SEQ ID NO: 174; or (e) the nucleic acid sequence has at least 70%, 80%, or 90% identity to SEQ ID NO: 175. In some embodiments, the organism is human, and: (a) the nucleic acid sequence has at least 70%, 80%, or 90% identity to SEQ ID NO: 176; (b) the nucleic acid sequence has at least 70%, 80%, or 90% identity to SEQ ID NO: 177; (c) the nucleic acid sequence has at least 70%, 80%, or 90% identity to SEQ ID NO: 178; or (d) the nucleic acid sequence has at least 70%, 80%, or 90% identity to SEQ ID NO: 179.

[0009] In some aspects, the present disclosure provides for a vector comprising a nucleic acid sequence encoding a class 2, type II Cas endonuclease comprising a RuvC_III domain and an HNH domain, wherein the endonuclease is derived from an uncultivated microorganism.

[0010] In some aspects, the present disclosure provides for a vector comprising any of the nucleic acids described herein. In some embodiments, the nucleic acid further comprises a nucleic acid encoding an engineered guide ribonucleic acid structure configured to form a complex with the endonuclease comprising: (a) a guide ribonucleic acid sequence configured to hybridize to a target deoxyribonucleic acid sequence; and (b) a tracr ribonucleic acid sequence configured to bind to the endonuclease. In some embodiments, the vector is a plasmid, a minicircle, a CELiD, an adeno-associated virus (AAV) derived virion, or a lentivirus.

[0011] In some aspects, the present disclosure provides for a cell comprising any of the vectors described herein.

[0012] In some aspects, the present disclosure provides for a method of manufacturing an endonuclease, comprising cultivating any of the cells described herein.

[0013] In some aspects, the present disclosure provides for a method for binding, cleaving, marking, or modifying a double-stranded deoxyribonucleic acid polynucleotide, comprising: (a) contacting the double-stranded deoxyribonucleic acid polynucleotide with a class 2, type II Cas endonuclease in complex with an engineered guide ribonucleic acid structure configured to bind to the endonuclease and the double-stranded deoxyribonucleic acid polynucleotide; wherein the double-stranded deoxyribonucleic acid polynucleotide comprises a protospacer adjacent motif (PAM); and wherein the PAM comprises a sequence selected from the group consisting of SEQ ID NOs: 149-153 or SEQ ID NOs: 154-158. In some embodiments, the double-stranded deoxyribonucleic acid polynucleotide comprises a first strand comprising a sequence complementary to a sequence of the engineered guide ribonucleic acid structure and a second strand comprising the PAM. In some embodiments, the PAM is directly adjacent to the 3′ end of the sequence complementary to the sequence of the engineered guide ribonucleic acid structure. In some embodiments, the class 2, type II Cas endonuclease is not a Cas9 endonuclease, a Cas14 endonuclease, a Cas12a endonuclease, a Cas12b endonuclease, a Cas 12c endonuclease, a Cas12d endonuclease, a Cas12e endonuclease, a Cas13a endonuclease, a Cas13b endonuclease, a Cas13c endonuclease, or a Cas 13d endonuclease. In some embodiments, the class 2, type II Cas endonuclease is derived from an uncultivated microorganism. In some embodiments, the double-stranded deoxyribonucleic acid polynucleotide is a eukaryotic, plant, fungal, mammalian, rodent, or human double-stranded deoxyribonucleic acid polynucleotide. In some embodiments: (a) the PAM comprises SEQ ID NO: 149 or SEQ ID NO: 154; (b) the PAM comprises SEQ ID NO: 150 or SEQ ID NO: 155; (c) the PAM comprises SEQ ID NO: 151 or SEQ ID NO: 156; (d) the PAM comprises SEQ ID NO: 152 or SEQ ID NO: 157; or (e) the PAM comprises SEQ ID NO: 153 or SEQ ID NO: 158.

[0014] In some aspects, the present disclosure provides for a method of modifying a target nucleic acid locus, the method comprising delivering to the target nucleic acid locus any of the engineered nuclease systems described herein, wherein the endonuclease is configured to form a complex with the engineered guide ribonucleic acid structure, and wherein the complex is configured such that upon binding of the complex to the target nucleic acid locus, the complex modifies the target nucleic acid locus. In some embodiments, modifying the target nucleic acid locus comprises binding, nicking, cleaving, or marking the target nucleic acid locus. In some embodiments, the target nucleic acid locus comprises deoxyribonucleic acid (DNA) or ribonucleic acid (RNA). In some embodiments, the target nucleic acid comprises genomic DNA, viral DNA, viral RNA, or bacterial DNA. In some embodiments, the target nucleic acid locus is in vitro. In some embodiments, the target nucleic acid locus is within a cell. In some embodiments, the cell is a prokaryotic cell, a bacterial cell, a eukaryotic cell, a fungal cell, a plant cell, an animal cell, a mammalian cell, a rodent cell, a primate cell, or a human cell. In some embodiments, delivering the engineered nuclease system to the target nucleic acid locus comprises delivering any of the nucleic acids described herein or any of the vectors described herein. In some embodiments, delivering the engineered nuclease system to the target nucleic acid locus comprises delivering a nucleic acid comprising an open reading frame encoding the endonuclease. In some embodiments, the nucleic acid comprises a promoter to which the open reading frame encoding the endonuclease is operably linked. In some embodiments, delivering the engineered nuclease system to the target nucleic acid locus comprises delivering a capped mRNA containing the open reading frame encoding the endonuclease. In some embodiments, delivering the engineered nuclease system to the target nucleic acid locus comprises delivering a translated polypeptide. In some embodiments, delivering the engineered nuclease system to the target nucleic acid locus comprises delivering a deoxyribonucleic acid (DNA) encoding the engineered guide ribonucleic acid structure operably linked to a ribonucleic acid (RNA) pol III promoter. In some embodiments, the endonuclease induces a single-stranded break or a double-stranded break at or proximal to the target locus.

[0015] Additional aspects and advantages of the present disclosure will become readily apparent to those skilled in this art from the following detailed description, wherein only illustrative embodiments of the present disclosure are shown and described. As will be realized, the present disclosure is capable of other and different embodiments, and its several details are capable of modifications in various obvious respects, all without departing from the disclosure. Accordingly, the drawings and description are to be regarded as illustrative in nature, and not as restrictive.

### INCORPORATION BY REFERENCE

[0016] All publications, patents, and patent applications mentioned in this specification are herein incorporated by reference to the same extent as if each individual publication, patent, or patent application was specifically and individually indicated to be incorporated by reference. To the extent publications and patents or patent applications incorporated by reference contradict the disclosure contained in the specification, the specification is intended to supersede and/or take precedence over any such contradictory material.

### BRIEF DESCRIPTION OF THE DRAWINGS

[0017] The novel features of the invention are set forth with particularity in the appended claims. A better understanding of the features and advantages of the present invention will be obtained by reference to the following detailed description that sets forth illustrative embodiments, in which the principles of the invention are utilized, and the accompanying drawings (also “Figure” and “FIG.” herein), of which:

[0018] FIG. 1 depicts typical organization of CRISPR/Cas loci of different classes.

[0019] FIG. 2 depicts the architecture of a natural Class II/Type II crRNA/tracrRNA pair, compared to a hybrid sgRNA wherein both are joined.

[0020] FIG. 3 depicts schematics showing organization of CRISPR loci encoding enzymes from the MG6 family.

[0021] FIGS. 4A, 4B, and 4C depicts a structure-based alignment of an enzyme of the present disclosure (MG6-1) versus Cas9 from Staphylococcus aureus (SEQ ID NO:196).

[0022] FIGS. 5A, 5B, 5C, 5D, 5E, 5F, 5G, 5H, 5I, 5J and 5K depict a structure-based alignment of MG6 family enzymes MG6-1 through MG6-6 (SEQ ID NOs: 28-33).

[0023] FIGS. 6, 7, 8, and 9 depict agarose gels showing the results of PAM vector library cleavage in the presence of TXTL extracts containing various MG family nucleases and their corresponding tracrRNAs or sgRNAs.

[0024] FIG. 10 depicts in cell cleavage of E. coli genomic DNA using MG6-3 along with its corresponding sgRNA. Shown are dilution series of cells transformed with MG6-3 along with target or non-target spacer (top); bottom panel shows the data quantitated, where the right bar represents non-target sgRNA and the left bar represents target sgRNA.

[0025] FIG. 11 depicts in vitro cleavage of DNA by MG7-1 in complex with its corresponding sgRNA containing a 22-nucleotide targeting sequence, showing that the MG7-1/sgRNA combination is effective to cleave DNA.

[0026] FIG. 12 depicts in cell cleavage of E. coli genomic DNA using MG7-1 along with its corresponding sgRNA. Shown are dilution series of cells transformed with MG7-1 along with target or non-target spacer (top); bottom panel shows the data quantitated, where the right bar represents non-target sgRNA and the left bar represents target sgRNA.

[0027] FIG. 13 depicts in cell indel formation generated by transfection of HEK cells with MG7-1 as described in Example 13 alongside its corresponding sgRNAs containing various different targeting sequences targeting various locations in the human genome.

[0028] FIG. 14 depicts in cell cleavage of E. coli genomic DNA using MG16-1 along with its corresponding sgRNA. Shown are dilution series of cells transformed with MG16-1 along with target or non-target spacer (top); bottom panel shows the data quantitated, where the right bar represents non-target sgRNA and the left bar represents target sgRNA.

[0029] FIGS. 15 and 16 depict predicted structures (predicted e.g., as in Example 7) of corresponding sgRNAs of MG enzymes described herein.

[0030] FIGS. 17, 18, and 19 depict seqLogo representations of PAM sequences derived via NGS as described herein (e.g. as described in Example 6).

### BRIEF DESCRIPTION OF THE SEQUENCE LISTING

[0031] The Sequence Listing filed herewith provides exemplary polynucleotide and polypeptide sequences for use in methods, compositions and systems according to the disclosure. Below are exemplary descriptions of sequences therein.

[0032] MG1

[0033] SEQ ID NO: 1 shows the full-length peptide sequences of an MG1 nucleases.

[0034] SEQ ID NO: 45 shows the peptide sequence of a RuvC_III domains of MG1 nucleases above.

[0035] SEQ ID NO: 89 shows the peptide of HNH domains of MG1 nucleases above.

[0036] MG2

[0037] SEQ ID NOs: 2 shows the full-length peptide sequences of an MG2 nuclease.

[0038] SEQ ID NOs: 46 shows the peptide sequence of a RuvC_III domain of the MG2 nuclease above.

[0039] SEQ ID NO: 90 shows the peptide of HNH domains of the MG2 nuclease above.

[0040] SEQ ID NO: 138 shows the nucleotide sequences of an MG2 tracrRNA derived from the same loci as MG2 nuclease above.

[0041] SEQ ID NO: 133 shows the nucleotide sequence of an sgRNAs engineered to function with the MG2 nuclease.

[0042] SEQ ID NO: 170 shows the nucleotide sequence of an E. coli codon-optimized coding sequence for an MG2 nuclease.

[0043] SEQ ID NO: 176 shows the nucleotide sequence of a human codon-optimized coding sequence for an MG2 nuclease.

[0044] MG4

[0045] SEQ ID NOs: 4-27 show the full-length peptide sequences of MG4 nucleases.

[0046] SEQ ID NOs: 48-71 show the peptide sequences of RuvC_III domains of MG4 nucleases above.

[0047] SEQ ID NOs: 92-115 show the peptide of HNH domains of MG4 nucleases above.

[0048] SEQ ID NOs: 139-143 show the nucleotide sequences of MG4 tracrRNAs derived from the same loci as MG4 nucleases above.

[0049] SEQ ID NO: 134 shows the nucleotide sequence of an sgRNA engineered to function with an MG4 nuclease.

[0050] SEQ ID NOs: 171-172 show nucleotide sequences of E. coli codon-optimized coding sequences for MG4 nucleases.

[0051] MG6

[0052] SEQ ID NOs: 28-39 and 229-236 show the full-length peptide sequences of MG6 nucleases.

[0053] SEQ ID NOs: 72-83 and 246-253 show the peptide sequences of RuvC_III domains of MG6 nucleases above.

[0054] SEQ ID NOs: 116-127 and 263-270 show the peptide of HNH domains of MG6 nucleases above.

[0055] SEQ ID NOs: 144-146 show the nucleotide sequences of MG6 tracrRNAs derived from the same loci as MG6 nucleases above.

[0056] SEQ ID NO: 135 shows the nucleotide sequence of an sgRNA engineered to function with an MG6 nuclease.

[0057] SEQ ID NO: 173 shows a nucleotide sequence of an E. coli codon-optimized coding sequences for an MG6 nuclease.

[0058] SEQ ID NO: 177 shows a nucleotide sequence of a human codon-optimized coding sequence for an MG6 nuclease.

[0059] MG7

[0060] SEQ ID NOs: 40-42 and 237-245 show the full-length peptide sequences of MG7 nucleases.

[0061] SEQ ID NOs: 84-86 and 254-262 show the peptide sequences of RuvC_III domains of MG7 nucleases above.

[0062] SEQ ID NOs: 128-130 and 271-279 show the peptide of HNH domains of MG7 nucleases above.

[0063] SEQ ID NO: 147 and 280 show the nucleotide sequences of an MG7 tracrRNA derived from the same loci as MG7 nucleases above.

[0064] SEQ ID NO: 136 shows the nucleotide sequence of sgRNAs engineered to function with an MG7 nuclease.

[0065] SEQ ID NO: 174 shows a nucleotide sequence of an E. coli codon-optimized coding sequences for an MG7 nuclease.

[0066] SEQ ID NO: 178 shows a nucleotide sequence of a human codon-optimized coding sequence for an MG7 nuclease.

[0067] MG16

[0068] SEQ ID NOs: 43-44 show the full-length peptide sequences of MG16 nucleases.

[0069] SEQ ID NOs: 87-88 show the peptide sequences of RuvC_III domains of MG16 nucleases above.

[0070] SEQ ID NOs: 131-132 show the peptide of HNH domains of MG16 nucleases above.

[0071] SEQ ID NO: 148 shows the nucleotide sequences of an MG16 tracrRNA derived from the same loci as a MG16 nuclease above.

[0072] SEQ ID NO: 137 shows the nucleotide sequence of sgRNAs engineered to function with an MG16 nuclease.

[0073] SEQ ID NO: 175 shows an E. coli codon-optimized coding sequences for an MG16 nuclease.

[0074] SEQ ID NO: 179 shows a human codon-optimized coding sequences for an MG16 nuclease.

### DETAILED DESCRIPTION

[0075] While various embodiments of the invention have been shown and described herein, it will be obvious to those skilled in the art that such embodiments are provided by way of example only. Numerous variations, changes, and substitutions may occur to those skilled in the art without departing from the invention. It should be understood that various alternatives to the embodiments of the invention described herein may be employed.

[0076] Whenever the term “at least,” “greater than,” or “greater than or equal to” precedes the first numerical value in a series of two or more numerical values, the term “at least,” “greater than” or “greater than or equal to” applies to each of the numerical values in that series of numerical values. For example, greater than or equal to 1, 2, or 3 is equivalent to greater than or equal to 1, greater than or equal to 2, or greater than or equal to 3.

[0077] Whenever the term “no more than,” “less than,” or “less than or equal to” precedes the first numerical value in a series of two or more numerical values, the term “no more than,” “less than,” or “less than or equal to” applies to each of the numerical values in that series of numerical values. For example, less than or equal to 3, 2, or 1 is equivalent to less than or equal to 3, less than or equal to 2, or less than or equal to 1.

[0078] The practice of some methods disclosed herein employ, unless otherwise indicated, techniques of immunology, biochemistry, chemistry, molecular biology, microbiology, cell biology, genomics and recombinant DNA. See for example Sambrook and Green, Molecular Cloning: A Laboratory Manual, 4th Edition (2012); the series Current Protocols in Molecular Biology (F. M. Ausubel, et al. eds.); the series Methods In Enzymology (Academic Press, Inc.), PCR 2: A Practical Approach (M. J. MacPherson, B. D. Hames and G. R. Taylor eds. (1995)), Harlow and Lane, eds. (1988) Antibodies, A Laboratory Manual, and Culture of Animal Cells: A Manual of Basic Technique and Specialized Applications, 6th Edition (R. I. Freshney, ed. (2010)) (which is entirely incorporated by reference herein).

[0079] As used herein, the singular forms “a”, “an” and “the” are intended to include the plural forms as well, unless the context clearly indicates otherwise. Furthermore, to the extent that the terms “including”, “includes”, “having”, “has”, “with”, or variants thereof are used in either the detailed description and/or the claims, such terms are intended to be inclusive in a manner similar to the term “comprising”.

[0080] The term “about” or “approximately” means within an acceptable error range for the particular value as determined by one of ordinary skill in the art, which will depend in part on how the value is measured or determined, i.e., the limitations of the measurement system. For example, “about” can mean within one or more than one standard deviation, per the practice in the art. Alternatively, “about” can mean a range of up to 20%, up to 15%, up to 10%, up to 5%, or up to 1% of a given value.

[0081] As used herein, a “cell” generally refers to a biological cell. A cell may be the basic structural, functional and/or biological unit of a living organism. A cell may originate from any organism having one or more cells. Some non-limiting examples include: a prokaryotic cell, eukaryotic cell, a bacterial cell, an archaeal cell, a cell of a single-cell eukaryotic organism, a protozoa cell, a cell from a plant (e.g., cells from plant crops, fruits, vegetables, grains, soy bean, corn, maize, wheat, seeds, tomatoes, rice, cassava, sugarcane, pumpkin, hay, potatoes, cotton, cannabis, tobacco, flowering plants, conifers, gymnosperms, ferns, clubmosses, hornworts, liverworts, mosses), an algal cell, (e.g., Botryococcus braunii, Chlamydomonas reinhardtii, Nannochloropsis gaditana, Chlorella pyrenoidosa, Sargassum patens C. Agardh, and the like), seaweeds (e.g., kelp), a fungal cell (e.g., a yeast cell, a cell from a mushroom), an animal cell, a cell from an invertebrate animal (e.g., fruit fly, cnidarian, echinoderm, nematode, etc.), a cell from a vertebrate animal (e.g., fish, amphibian, reptile, bird, mammal), a cell from a mammal (e.g., a pig, a cow, a goat, a sheep, a rodent, a rat, a mouse, a non-human primate, a human, etc.), and etcetera. Sometimes a cell is not originating from a natural organism (e.g., a cell can be a synthetically made, sometimes termed an artificial cell).

[0082] The term “nucleotide,” as used herein, generally refers to a base-sugar-phosphate combination. A nucleotide may comprise a synthetic nucleotide. A nucleotide may comprise a synthetic nucleotide analog. Nucleotides may be monomeric units of a nucleic acid sequence (e.g., deoxyribonucleic acid (DNA) and ribonucleic acid (RNA)). The term nucleotide may include ribonucleoside triphosphates adenosine triphosphate (ATP), uridine triphosphate (UTP), cytosine triphosphate (CTP), guanosine triphosphate (GTP) and deoxyribonucleoside triphosphates such as dATP, dCTP, dITP, dUTP, dGTP, dTTP, or derivatives thereof. Such derivatives may include, for example, [αS]dATP, 7-deaza-dGTP and 7-deaza-dATP, and nucleotide derivatives that confer nuclease resistance on the nucleic acid molecule containing them. The term nucleotide as used herein may refer to dideoxyribonucleoside triphosphates (ddNTPs) and their derivatives. Illustrative examples of dideoxyribonucleoside triphosphates may include, but are not limited to, ddATP, ddCTP, ddGTP, ddITP, and ddTTP. A nucleotide may be unlabeled or detectably labeled, such as using moieties comprising optically detectable moieties (e.g., fluorophores). Labeling may also be carried out with quantum dots. Detectable labels may include, for example, radioactive isotopes, fluorescent labels, chemiluminescent labels, bioluminescent labels and enzyme labels. Fluorescent labels of nucleotides may include but are not limited fluorescein, 5-carboxyfluorescein (FAM), 2′7′-dimethoxy-4′5-dichloro-6-carboxyfluorescein (JOE), rhodamine, 6-carboxyrhodamine (R6G), N,N,N′,N′-tetramethyl-6-carboxyrhodamine (TAMRA), 6-carboxy-X-rhodamine (ROX), 4-(4′dimethylaminophenylazo) benzoic acid (DABCYL), Cascade Blue, Oregon Green, Texas Red, Cyanine and 5-(2′-aminoethyl)aminonaphthalene-1-sulfonic acid (EDANS). Specific examples of fluorescently labeled nucleotides can include [R6G]dUTP, [TAMRA]dUTP, [R110]dCTP, [R6G]dCTP, [TAMRA]dCTP, [JOE]ddATP, [R6G]ddATP, [FAM]ddCTP, [R110]ddCTP, [TAMRA]ddGTP, [ROX]ddTTP, [dR6G]ddATP, [dR110]ddCTP, [dTAMRA]ddGTP, and [dROX]ddTTP available from Perkin Elmer, Foster City, Calif.; FluoroLink DeoxyNucleotides, FluoroLink Cy3-dCTP, FluoroLink Cy5-dCTP, FluoroLink Fluor X-dCTP, FluoroLink Cy3-dUTP, and FluoroLink Cy5-dUTP available from Amersham, Arlington Heights, Ill.; Fluorescein-15-dATP, Fluorescein-12-dUTP, Tetramethyl-rodamine-6-dUTP, IR770-9-dATP, Fluorescein-12-ddUTP, Fluorescein-12-UTP, and Fluorescein-15-2′-dATP available from Boehringer Mannheim, Indianapolis, Ind.; and Chromosome Labeled Nucleotides, BODIPY-FL-14-UTP, BODIPY-FL-4-UTP, BODIPY-TMR-14-UTP, BODIPY-TMR-14-dUTP, BODIPY-TR-14-UTP, BODIPY-TR-14-dUTP, Cascade Blue-7-UTP, Cascade Blue-7-dUTP, fluorescein-12-UTP, fluorescein-12-dUTP, Oregon Green 488-5-dUTP, Rhodamine Green-5-UTP, Rhodamine Green-5-dUTP, tetramethylrhodamine-6-UTP, tetramethylrhodamine-6-dUTP, Texas Red-5-UTP, Texas Red-5-dUTP, and Texas Red-12-dUTP available from Molecular Probes, Eugene, Oreg. Nucleotides can also be labeled or marked by chemical modification. A chemically-modified single nucleotide can be biotin-dNTP. Some non-limiting examples of biotinylated dNTPs can include, biotin-dATP (e.g., bio-N6-ddATP, biotin-14-dATP), biotin-dCTP (e.g., biotin-11-dCTP, biotin-14-dCTP), and biotin-dUTP (e.g., biotin-11-dUTP, biotin-16-dUTP, biotin-20-dUTP).

[0083] The terms “polynucleotide,” “oligonucleotide,” and “nucleic acid” are used interchangeably to generally refer to a polymeric form of nucleotides of any length, either deoxyribonucleotides or ribonucleotides, or analogs thereof, either in single-, double-, or multi-stranded form. A polynucleotide may be exogenous or endogenous to a cell. A polynucleotide may exist in a cell-free environment. A polynucleotide may be a gene or fragment thereof. A polynucleotide may be DNA. A polynucleotide may be RNA. A polynucleotide may have any three-dimensional structure and may perform any function. A polynucleotide may comprise one or more analogs (e.g., altered backbone, sugar, or nucleobase). If present, modifications to the nucleotide structure may be imparted before or after assembly of the polymer. Some non-limiting examples of analogs include: 5-bromouracil, peptide nucleic acid, xeno nucleic acid, morpholinos, locked nucleic acids, glycol nucleic acids, threose nucleic acids, dideoxynucleotides, cordycepin, 7-deaza-GTP, fluorophores (e.g., rhodamine or fluorescein linked to the sugar), thiol containing nucleotides, biotin linked nucleotides, fluorescent base analogs, CpG islands, methyl-7-guanosine, methylated nucleotides, inosine, thiouridine, pseudouridine, dihydrouridine, queuosine, and wyosine. Non-limiting examples of polynucleotides include coding or non-coding regions of a gene or gene fragment, loci (locus) defined from linkage analysis, exons, introns, messenger RNA (mRNA), transfer RNA (tRNA), ribosomal RNA (rRNA), short interfering RNA (siRNA), short-hairpin RNA (shRNA), micro-RNA (miRNA), ribozymes, cDNA, recombinant polynucleotides, branched polynucleotides, plasmids, vectors, isolated DNA of any sequence, isolated RNA of any sequence, cell-free polynucleotides including cell-free DNA (cfDNA) and cell-free RNA (cfRNA), nucleic acid probes, and primers. The sequence of nucleotides may be interrupted by non-nucleotide components.

[0084] The terms “transfection” or “transfected” generally refer to introduction of a nucleic acid into a cell by non-viral or viral-based methods. The nucleic acid molecules may be gene sequences encoding complete proteins or functional portions thereof. See, e.g., Sambrook et al., 1989, Molecular Cloning: A Laboratory Manual, 18.1-18.88.

[0085] The terms “peptide,” “polypeptide,” and “protein” are used interchangeably herein to generally refer to a polymer of at least two amino acid residues joined by peptide bond(s). This term does not connote a specific length of polymer, nor is it intended to imply or distinguish whether the peptide is produced using recombinant techniques, chemical or enzymatic synthesis, or is naturally occurring. The terms apply to naturally occurring amino acid polymers as well as amino acid polymers comprising at least one modified amino acid. In some cases, the polymer may be interrupted by non-amino acids. The terms include amino acid chains of any length, including full length proteins, and proteins with or without secondary and/or tertiary structure (e.g., domains). The terms also encompass an amino acid polymer that has been modified, for example, by disulfide bond formation, glycosylation, lipidation, acetylation, phosphorylation, oxidation, and any other manipulation such as conjugation with a labeling component. The terms “amino acid” and “amino acids,” as used herein, generally refer to natural and non-natural amino acids, including, but not limited to, modified amino acids and amino acid analogues. Modified amino acids may include natural amino acids and non-natural amino acids, which have been chemically modified to include a group or a chemical moiety not naturally present on the amino acid. Amino acid analogues may refer to amino acid derivatives. The term “amino acid” includes both D-amino acids and L-amino acids.

[0086] As used herein, the “non-native” can generally refer to a nucleic acid or polypeptide sequence that is not found in a native nucleic acid or protein. Non-native may refer to affinity tags. Non-native may refer to fusions. Non-native may refer to a naturally occurring nucleic acid or polypeptide sequence that comprises mutations, insertions and/or deletions. A non-native sequence may exhibit and/or encode for an activity (e.g., enzymatic activity, methyltransferase activity, acetyltransferase activity, kinase activity, ubiquitinating activity, etc.) that may also be exhibited by the nucleic acid and/or polypeptide sequence to which the non-native sequence is fused. A non-native nucleic acid or polypeptide sequence may be linked to a naturally-occurring nucleic acid or polypeptide sequence (or a variant thereof) by genetic engineering to generate a chimeric nucleic acid and/or polypeptide sequence encoding a chimeric nucleic acid and/or polypeptide.

[0087] The term “promoter”, as used herein, generally refers to the regulatory DNA region which controls transcription or expression of a gene and which may be located adjacent to or overlapping a nucleotide or region of nucleotides at which RNA transcription is initiated. A promoter may contain specific DNA sequences which bind protein factors, often referred to as transcription factors, which facilitate binding of RNA polymerase to the DNA leading to gene transcription. A ‘basal promoter’, also referred to as a ‘core promoter’, may generally refer to a promoter that contains all the basic necessary elements to promote transcriptional expression of an operably linked polynucleotide. Eukaryotic basal promoters typically, though not necessarily, contain a TATA-box and/or a CAAT box.

[0088] The term “expression”, as used herein, generally refers to the process by which a nucleic acid sequence or a polynucleotide is transcribed from a DNA template (such as into mRNA or other RNA transcript) and/or the process by which a transcribed mRNA is subsequently translated into peptides, polypeptides, or proteins. Transcripts and encoded polypeptides may be collectively referred to as “gene product.” If the polynucleotide is derived from genomic DNA, expression may include splicing of the mRNA in a eukaryotic cell.

[0089] As used herein, “operably linked”, “operable linkage”, “operatively linked”, or grammatical equivalents thereof generally refer to juxtaposition of genetic elements, e.g., a promoter, an enhancer, a polyadenylation sequence, etc., wherein the elements are in a relationship permitting them to operate in the expected manner. For instance, a regulatory element, which may comprise promoter and/or enhancer sequences, is operatively linked to a coding region if the regulatory element helps initiate transcription of the coding sequence. There may be intervening residues between the regulatory element and coding region so long as this functional relationship is maintained.

[0090] A “vector” as used herein, generally refers to a macromolecule or association of macromolecules that comprises or associates with a polynucleotide and which may be used to mediate delivery of the polynucleotide to a cell. Examples of vectors include plasmids, viral vectors, liposomes, and other gene delivery vehicles. The vector generally comprises genetic elements, e.g., regulatory elements, operatively linked to a gene to facilitate expression of the gene in a target.

[0091] As used herein, “an expression cassette” and “a nucleic acid cassette” are used interchangeably generally to refer to a combination of nucleic acid sequences or elements that are expressed together or are operably linked for expression. In some cases, an expression cassette refers to the combination of regulatory elements and a gene or genes to which they are operably linked for expression.

[0092] A “functional fragment” of a DNA or protein sequence generally refers to a fragment that retains a biological activity (either functional or structural) that is substantially similar to a biological activity of the full-length DNA or protein sequence. A biological activity of a DNA sequence may be its ability to influence expression in a manner known to be attributed to the full-length sequence.

[0093] As used herein, “engineered” with reference to a protein, generally refers to a non-naturally occurring protein or nucleic acid, including, but not limited to, a protein that is derived from a naturally occurring protein, or where a naturally occurring protein has been modified or reprogrammed to have a certain property. An engineered system comprises at least one engineered component.

[0094] As used herein, “synthetic” and “artificial” are used interchangeably to refer to a protein or a domain thereof that has low sequence identity (e.g., less than 50% sequence identity, less than 25% sequence identity, less than 10% sequence identity, less than 5% sequence identity, less than 1% sequence identity) to a naturally occurring human protein. For example, VPR and VP64 domains are synthetic transactivation domains.

[0095] The term “tracrRNA” or “tracr sequence”, as used herein, can generally refer to a nucleic acid with at least about 5%, 10%, 20%, 30%, 40%, 50%, 60%, 70%, 80%, 90%, 95%, or 100% sequence identity and/or sequence similarity to a wild type exemplary tracrRNA sequence (e.g., a tracrRNA from S. pyogenes S. aureus, etc). tracrRNA can refer to a nucleic acid with at most about 5%, 10%, 20%, 30%, 40%, 50%, 60%, 70%, 80%, 90%, or 100% sequence identity and/or sequence similarity to a wild type exemplary tracrRNA sequence (e.g., a tracrRNA from S. pyogenes S. aureus, etc). tracrRNA may refer to a modified form of a tracrRNA that can comprise a nucleotide change such as a deletion, insertion, or substitution, variant, mutation, or chimera. A tracrRNA may refer to a nucleic acid that can be at least about 60% identical to a wild type exemplary tracrRNA (e.g., a tracrRNA from S. pyogenes S. aureus, etc) sequence over a stretch of at least 6 contiguous nucleotides. For example, a tracrRNA sequence can be at least about 60% identical, at least about 65% identical, at least about 70% identical, at least about 75% identical, at least about 80% identical, at least about 85% identical, at least about 90% identical, at least about 95% identical, at least about 98% identical, at least about 99% identical, or 100% identical to a wild type exemplary tracrRNA (e.g., a tracrRNA from S. pyogenes S. aureus, etc) sequence over a stretch of at least 6 contiguous nucleotides.

[0096] As used herein, a “guide nucleic acid” can generally refer to a nucleic acid that may hybridize to another nucleic acid. A guide nucleic acid may be RNA. A guide nucleic acid may be DNA. The guide nucleic acid may be programmed to bind to a sequence of nucleic acid site-specifically. The nucleic acid to be targeted, or the target nucleic acid, may comprise nucleotides. The guide nucleic acid may comprise nucleotides. A portion of the target nucleic acid may be complementary to a portion of the guide nucleic acid. The strand of a double-stranded target polynucleotide that is complementary to and hybridizes with the guide nucleic acid may be called the complementary strand. The strand of the double-stranded target polynucleotide that is complementary to the complementary strand, and therefore may not be complementary to the guide nucleic acid may be called noncomplementary strand. A guide nucleic acid may comprise a polynucleotide chain and can be called a “single guide nucleic acid.” A guide nucleic acid may comprise two polynucleotide chains and may be called a “double guide nucleic acid.” If not otherwise specified, the term “guide nucleic acid” may be inclusive, referring to both single guide nucleic acids and double guide nucleic acids. A guide nucleic acid may comprise a segment that can be referred to as a “nucleic acid-targeting segment” or a “nucleic acid-targeting sequence.” A nucleic acid-targeting segment may comprise a sub-segment that may be referred to as a “protein binding segment” or “protein binding sequence” or “Cas protein binding segment”.

[0097] The term “sequence identity” or “percent identity” in the context of two or more nucleic acids or polypeptide sequences, generally refers to two (e.g., in a pairwise alignment) or more (e.g., in a multiple sequence alignment) sequences that are the same or have a specified percentage of amino acid residues or nucleotides that are the same, when compared and aligned for maximum correspondence over a local or global comparison window, as measured using a sequence comparison algorithm. Suitable sequence comparison algorithms for polypeptide sequences include, e.g., BLASTP using parameters of a wordlength (W) of 3, an expectation (E) of 10, and the BLOSUM62 scoring matrix setting gap costs at existence of 11, extension of 1, and using a conditional compositional score matrix adjustment for polypeptide sequences longer than 30 residues; BLASTP using parameters of a wordlength (W) of 2, an expectation (E) of 1000000, and the PAM30 scoring matrix setting gap costs at 9 to open gaps and 1 to extend gaps for sequences of less than 30 residues (these are the default parameters for BLASTP in the BLAST suite available at https://blast.ncbi.nlm.nih.gov); CLUSTALW with parameters of; the Smith-Waterman homology search algorithm with parameters of a match of 2, a mismatch of −1, and a gap of −1; MUSCLE with default parameters; MAFFT with parameters retree of 2 and maxiterations of 1000; Novafold with default parameters. As used herein, the term “RuvC_III domain” generally refers to a third discontinuous segment of a RuvC endonuclease domain (the RuvC nuclease domain being comprised of three discontinuous segments, RuvC_I, RuvC_II, and RuvC_III).

[0098] Overview

[0099] The discovery of new Cas enzymes with unique functionality and structure may offer the potential to further disrupt deoxyribonucleic acid (DNA) editing technologies, improving speed, specificity, functionality, and ease of use. Relative to the predicted prevalence of Clustered Regularly Interspaced Short Palindromic Repeats (CRISPR) systems in microbes and the sheer diversity of microbial species, relatively few functionally characterized CRISPR/Cas enzymes exist in the literature. This is partly because a huge number of microbial species may not be readily cultivated in laboratory conditions. Metagenomic sequencing from natural environmental niches that represent large numbers of microbial species may offer the potential to drastically increase the number of new CRISPR/Cas systems known and speed the discovery of new oligonucleotide editing functionalities. A recent example of the fruitfulness of such an approach is demonstrated by the 2016 discovery of CasX/CasY CRISPR systems from metagenomic analysis of natural microbial communities.

[0100] CRISPR/Cas systems are RNA-directed nuclease complexes that have been described to function as an adaptive immune system in microbes. In their natural context, CRISPR/Cas systems occur in CRISPR (clustered regularly interspaced short palindromic repeats) operons or loci, which generally comprise two parts: (i) an array of short repetitive sequences (30-40 bp) separated by equally short spacer sequences, which encode the RNA-based targeting element; and (ii) ORFs encoding the Cas encoding the nuclease polypeptide directed by the RNA-based targeting element alongside accessory proteins/enzymes. Efficient nuclease targeting of a particular target nucleic acid sequence generally requires both (i) complementary hybridization between the first 6-8 nucleic acids of the target (the target seed) and the crRNA guide; and (ii) the presence of a protospacer-adjacent motif (PAM) sequence within a defined vicinity of the target seed (the PAM usually being a sequence not commonly represented within the host genome). Depending on the exact function and organization of the system, CRISPR-Cas systems are commonly organized into 2 classes, 5 types and 16 subtypes based on shared functional characteristics and evolutionary similarity.

[0101] Class I CRISPR-Cas systems have large, multisubunit effector complexes, and comprise Types I, III, and IV.

[0102] Type I CRISPR-Cas systems are considered of moderate complexity in terms of components. In Type I CRISPR-Cas systems, the array of RNA-targeting elements is transcribed as a long precursor crRNA (pre-crRNA) that is processed at repeat elements to liberate short, mature crRNAs that direct the nuclease complex to nucleic acid targets when they are followed by a suitable short consensus sequence called a protospacer-adjacent motif (PAM). This processing occurs via an endoribonuclease subunit (Cash) of a large endonuclease complex called Cascade, which also comprises a nuclease (Cas3) that protein component of the crRNA-directed nuclease complex. Cas I nucleases function primarily as DNA nucleases.

[0103] Type III CRISPR systems may be characterized by the presence of a central nuclease, known as Cas10, alongside a repeat-associated mysterious protein (RAMP) that comprises Csm or Cmr protein subunits. Like in Type I systems, the mature crRNA is processed from a pre-crRNA using a Cash-like enzyme. Unlike type I and II systems, type III systems appear to target and cleave DNA-RNA duplexes (such as DNA strands being used as templates for an RNA polymerase).

[0104] Type IV CRISPR-Cas systems possess an effector complex that consists of a highly reduced large subunit nuclease (csf1), two genes for RAMP proteins of the Cas5 (csf3) and Cas7 (csf2) groups, and, in some cases, a gene for a predicted small subunit; such systems are commonly found on endogenous plasmids.

[0105] Class II CRISPR-Cas systems generally have single-polypeptide multidomain nuclease effectors, and comprise Types II, V and VI.

[0106] Type II CRISPR-Cas systems are considered the simplest in terms of components. In Type II CRISPR-Cas systems, the processing of the CRISPR array into mature crRNAs does not require the presence of a special endonuclease subunit, but rather a small trans-encoded crRNA (tracrRNA) with a region complementary to the array repeat sequence; the tracrRNA interacts with both its corresponding effector nuclease (Cas9) and the repeat sequence to form a precursor dsRNA structure, which is cleaved by endogenous RNAse III to generate a mature Cas9 enzyme loaded with both tracrRNA and crRNA. Cas II nucleases are known as DNA nucleases. The Cas9 effector has a characteristic structure, consisting of a RuvC-like endonuclease domain that adopts the RNase H fold with an unrelated HNH nuclease domain inserted within the folds of the RuvC-like nuclease domain. The RuvC-like domain is responsible for the cleavage of the target (e.g., crRNA complementary) DNA strand, while the HNH domain is responsible for cleavage of the displaced DNA strand.

[0107] Type V CRISPR-Cas systems are characterized by a nuclease effector (Cas12) structure similar to that of Type II/Cas9, comprising a RuvC-like domain. Similar to Type II, most (but not all) Type V CRISPR systems use a tracrRNA to process pre-crRNAs into mature crRNAs; however, unlike Type II systems which requires RNAse III to cleave the pre-crRNA into multiple crRNAs, type V systems are capable of using the effector nuclease itself (Cas12) to cleave pre-crRNAs. Like Type-II CRISPR-Cas systems, Type V CRISPR-Cas systems are again known as DNA nucleases. Unlike Type II CRISPR-Cas systems, some Type V enzymes (e.g., Cas12a) appear to have a robust single-stranded nonspecific deoxyribonuclease activity that is activated by the first crRNA directed cleavage of a double-stranded target sequence.

[0108] Type VI CRISPR-Cas systems are unique in that they appear to be the only class so far known as RNA-guided RNA endonucleases. Instead of RuvC-like domains, the single polypeptide effector of Type VI systems (Cas13) comprises two HEPN ribonuclease domains. Differing from both Type II and V systems, Type VI systems also appear to not need a tracrRNA for processing of pre-crRNA into crRNA. Similar to type V systems, however, some Type VI systems (e.g., C2C2) appear to possess robust single-stranded nonspecific nuclease (ribonuclease) activity activated by the first crRNA directed cleavage of a target RNA.

[0109] Because of their simpler architecture, Class II CRISPR-Cas have been most widely adopted for engineering and development as designer nuclease/genome editing applications.

[0110] One of the early adaptations of such a system for in vitro use can be found in Jinek et al. (Science. 2012 Aug. 17; 337(6096):816-21, which is entirely incorporated herein by reference). The Jinek study first described a system that involved (i) recombinantly-expressed, purified full-length Cas9 (e.g., Class II, Type II Cas enzyme) isolated from S. pyogenes SF370, (ii) purified mature ˜42 nt crRNA bearing a ˜20 nt 5′ sequence complementary to the target DNA sequence desired to be cleaved followed by a 3′ tracr-binding sequence (the whole crRNA being in vitro transcribed from a synthetic DNA template carrying a T7 promoter sequence); (iii) purified tracrRNA in vitro transcribed from a synthetic DNA template carrying a T7 promoter sequence, and (iv) Mg2+. Jinek later described an improved, engineered system wherein the crRNA of (ii) is joined to the 5′ end of (iii) by a linker (e.g., GAAA) to form a single fused synthetic guide RNA (sgRNA) capable of directing Cas9 to a target by itself (compare top and bottom panel of FIG. 2).

[0111] Mali et al. (Science. 2013 Feb. 15; 339(6121): 823-826.), which is entirely incorporated herein by reference, later adapted this system for use in mammalian cells by providing DNA vectors encoding (i) an ORF encoding codon-optimized Cas9 (e.g., Class II, Type II Cas enzyme) under a suitable mammalian promoter with a C-terminal nuclear localization sequence (e.g., SV40 NLS) and a suitable polyadenylation signal (e.g., TK pA signal); and (ii) an ORF encoding an sgRNA (having a 5′ sequence beginning with G followed by 20 nt of a complementary targeting nucleic acid sequence joined to a 3′ tracr-binding sequence, a linker, and the tracrRNA sequence) under a suitable Polymerase III promoter (e.g., the U6 promoter).

### MG1 Enzymes

[0112] In one aspect, the present disclosure provides for an engineered nuclease system comprising (a) an endonuclease. In some cases, the endonuclease is a Cas endonuclease. In some cases, the endonuclease is a Type II, Class II Cas endonuclease. The endonuclease may comprise a RuvC_III domain, wherein said RuvC_III domain has at least about 70% sequence identity to SEQ ID NO: 45 or a functional variant thereof. In some cases, the endonuclease may comprise a RuvC_III domain, wherein the RuvC_III domain has at least about 20%, at least about 25%, at least about 30%, at least about 35%, at least about 40%, at least about 45%, at least about 50%, at least about 55%, at least about 60%, at least about 65%, at least about 70%, at least about 75%, at least about 80%, at least about 85%, at least about 90%, at least about 91%, at least about 92%, at least about 93%, at least about 94%, at least about 95%, at least about 96%, at least about 97%, at least about 98%, at least about 99% identity to any one of SEQ ID NOs: 45 or a functional variant thereof. The endonuclease may comprise a RuvC_III domain substantially identical to SEQ ID NOs: 45 or a functional variant thereof.

[0113] The endonuclease may comprise an HNH domain having at least about 70% identity to SEQ ID NO: 89 or a functional variant thereof. In some cases, the endonuclease may comprise an HNH domain having at least about 70%, at least about 75%, at least about 80%, at least about 85%, at least about 90%, at least about 91%, at least about 92%, at least about 93%, at least about 94%, at least about 95%, at least about 96%, at least about 97%, at least about 98%, or at least about 99% identical SEQ ID NOs: 89 or a functional variant thereof. The endonuclease may comprise an HNH domain substantially identical to SEQ ID NOs: 89 or a functional variant thereof.

[0114] In some cases, the endonuclease may comprise a variant having at least about 30%, at least about 35%, at least about 40%, at least about 45%, at least about 50%, at least about 55%, at least about 60%, at least about 65%, at least about 70%, at least about 75%, at least about 80%, at least about 85%, at least about 90%, at least about 95%, at least about 96%, at least about 97%, at least about 98%, or at least about 99% identity to SEQ ID NO: 1 or a functional variant thereof. In some cases, the endonuclease may be substantially identical to SEQ ID NOs: 1 or a functional variant thereof.

[0115] In some cases, the endonuclease may comprise a variant having one or more nuclear localization sequences (NLSs). The NLS may be proximal to the N- or C-terminus of said endonuclease. The NLS may be appended N-terminal or C-terminal to SEQ ID NOs: 1 or a functional variant thereof, or to a variant having at least about 30%, at least about 35%, at least about 40%, at least about 45%, at least about 50%, at least about 55%, at least about 60%, at least about 65%, at least about 70%, at least about 75%, at least about 80%, at least about 85%, at least about 90%, at least about 95%, at least about 96%, at least about 97%, at least about 98%, or at least about 99% identity to SEQ ID NOs: 1. The NLS may be an SV40 large T antigen NLS. The NLS may be a c-myc NLS. The NLS can comprise a sequence with at least about 80%, at least about 85%, at least about 90%, at least about 95%, at least about 99% identity to any one of SEQ ID NOs: 180-195. The NLS can comprise a sequence substantially identical to any one of SEQ ID NOs: 180-195. The NLS can comprise any of the sequences in Table 1 below, or a combination thereof:

TABLE 1
Example NLS Sequences that can be used with
Cas Effectors According to the Disclosure

| | | SEQ |
|---|---|---|
| | NLS amino acid | ID |
| Source | sequence | NO: |
| SV40 | PKKKRKV | 180 |
| nucleoplasmin | KRPAATKKAGQAKKKK | 181 |
| bipartite NLS | | |
| c-myc NLS | PAAKRVKLD | 182 |
| c-myc NLS | RQRRNELKRSP | 183 |
| hRNPAl M9 NLS | NQSSNFGPMKGGNFGG | 184 |
| | RSSGPYGGGGQYFA | |
| | KPRNQGGY | |
| Importin-alpha | RMRIZFKNKGKDTAEL | 185 |
| IBB domain | RRRRVEVSVELRKAK | |
| | KDEQILKRRNV | |
| Myoma T protein | VSRKRPRP | 186 |
| Myoma T protein | PPKKARED | 187 |
| p53 | PQPKKKPL | 188 |
| mouse c-ab1 IV | SALIKKKKKMAP | 189 |
| influenza virus | DRLRR | 190 |
| NS1 | | |
| influenza virus | PKQKKRK | 191 |
| NS1 | | |
| Hepatitis virus | RKLKKKIKKL | 192 |
| delta antigen | | |
| mouse Mx1 protein | REKKKFLKRR | 193 |
| human poly | KRKGDEVDGVDEVA | 194 |
| (ADP-ribose) | KKKSKK | |
| polymerase | | |
| steroid hormone | RKCLQAGMNLEARK | 195 |
| receptor | TKK | |
| (human) | | |
| glucocorticoid | | |

[0116] In some cases, the endonuclease may be recombinant (e.g., cloned, expressed, and purified by a suitable method such as expression in E. coli followed by epitope-tag purification).

[0117] In some cases, sequence identity may be determined by the BLASTP, CLUSTALW, MUSCLE, MAFFT, Novafold, or Smith-Waterman homology search algorithm. The sequence identity may be determined by the BLASTP algorithm using parameters of a wordlength (W) of 3, an expectation (E) of 10, and using a BLOSUM62 scoring matrix setting gap costs at existence of 11, extension of 1, and using a conditional compositional score matrix adjustment.

[0118] In some cases, the system above may comprise (b) at least one engineered synthetic guide ribonucleic acid (sgRNA) capable of forming a complex with the endonuclease bearing a 5′ targeting region complementary to a desired cleavage sequence. In some cases, the 5′ targeting region may comprises a PAM sequence compatible with the endonuclease. In some cases, the 5′ most nucleotide of the targeting region may be G. In some cases, the 5′ targeting region may be 15-23 nucleotides in length. The guide sequence and the tracr sequence may be supplied as separate ribonucleic acids (RNAs) or a single ribonucleic acid (RNA). The guide RNA may comprise a crRNA tracrRNA binding sequence 3′ to the targeting region. The guide RNA may comprise a tracrRNA sequence preceded by a 4-nucleotide linker 3′ to the crRNA tracrRNA binding region. The sgRNA may comprise, from 5′ to 3′: a non-natural guide nucleic acid sequence capable of hybridizing to a target sequence in a cell; and a tracr sequence. In some cases, the non-natural guide nucleic acid sequence and the tracr sequence are covalently linked.

[0119] In some cases, the tracr sequence may have a particular sequence. The tracr sequence may have at least about 80% to at least about 60-100 (e.g., at least about 60, at least about 65, at least about 70, at least about 75, at least about 80, at least about 85, or at least about 90) consecutive nucleotides of a natural tracrRNA sequence.

[0120] In some cases, the system above may comprise two different sgRNAs or guide RNAs targeting a first region and a second region for cleavage in a target DNA locus, wherein the second region is 3′ to the first region. In some cases, the system above may comprise a single- or double-stranded DNA repair template comprising from 5′ to 3′: a first homology arm comprising a sequence of at least about 20 (e.g., at least about 40, 80, 120, 150, 200, 300, 500, or 1 kb) nucleotides 5′ to the first region, a synthetic DNA sequence of at least about 10 nucleotides, and a second homology arm comprising a sequence of at least about 20 (e.g., at least about 40, 80, 120, 150, 200, 300, 500, or 1 kb) nucleotides 3′ to the second region.

[0121] In another aspect, the present disclosure provides a method for modifying a target nucleic acid locus. The method may comprise delivering to the target nucleic acid locus any of the non-natural systems disclosed herein, including an enzyme and at least one synthetic guide RNA (sgRNA) disclosed herein. The enzyme may form a complex with the at least one sgRNA, and upon binding of the complex to the target nucleic acid locus, may modify the target nucleic acid locus. Delivering the enzyme to said locus may comprise transfecting a cell with the system or nucleic acids encoding the system. Delivering the nuclease to said locus may comprise electroporating a cell with the system or nucleic acids encoding the system. Delivering the nuclease to said locus may comprise incubating the system in a buffer with a nucleic acid comprising the locus of interest. In some cases, the target nucleic acid locus comprises deoxyribonucleic acid (DNA) or ribonucleic acid (RNA). The target nucleic acid locus may comprise genomic DNA, viral DNA, viral RNA, or bacterial DNA. The target nucleic acid locus may be within a cell. The target nucleic acid locus may be in vitro. The target nucleic acid locus may be within a eukaryotic cell or a prokaryotic cell. The cell may be an animal cell, a human cell, bacterial cell, archaeal cell, or a plant cell. The enzyme may induce a single or double-stranded break at or proximal to the target locus of interest.

[0122] In cases where the target nucleic acid locus may be within a cell, the enzyme may be supplied as a nucleic acid containing an open reading frame encoding the enzyme having a RuvC_III domain having at least about 75% (e.g., at least about 90%, at least about 91%, at least about 92%, at least about 93%, at least about 94%, at least about 95%, at least about 96%, at least about 97%, at least about 98%, at least about 99%) identity to SEQ ID NO: 1 or a functional variant thereof. In some cases, the nucleic acid comprises a promoter to which the open reading frame encoding the endonuclease is operably linked. The promoter may be a CMV, EF1a, SV40, PGK1, Ubc, human beta actin, CAG, TRE, or CaMKIIa promoter. The endonuclease may be supplied as a capped mRNA containing said open reading frame encoding said endonuclease. The endonuclease may be supplied as a translated polypeptide. The at least one engineered sgRNA may be supplied as deoxyribonucleic acid (DNA) containing a gene sequence encoding said at least one engineered sgRNA operably linked to a ribonucleic acid (RNA) pol III promoter. In some cases, the organism may be eukaryotic. In some cases, the organism may be fungal. In some cases, the organism may be human.

[0123] In some cases, the present disclosure may provide for an expression cassette comprising the system disclosed herein, or the nucleic acid described herein. In some cases, the expression cassette or nucleic acid may be supplied as a vector. In some cases, the expression cassette, nucleic acid, or vector may be supplied in a cell.

[0124] MG2 Enzymes

[0125] In one aspect, the present disclosure provides for an engineered nuclease system comprising (a) an endonuclease. In some cases, the endonuclease is a Cas endonuclease. In some cases, the endonuclease is a Type II, Class II Cas endonuclease. The endonuclease may comprise a RuvC_III domain, wherein said RuvC_III domain has at least about 70% sequence identity to SEQ ID NO: 46 or a functional variant thereof. In some cases, the endonuclease may comprise a RuvC_III domain, wherein the RuvC_III domain has at least about 20%, at least about 25%, at least about 30%, at least about 35%, at least about 40%, at least about 45%, at least about 50%, at least about 55%, at least about 60%, at least about 65%, at least about 70%, at least about 75%, at least about 80%, at least about 85%, at least about 90%, at least about 91%, at least about 92%, at least about 93%, at least about 94%, at least about 95%, at least about 96%, at least about 97%, at least about 98%, at least about 99% identity to SEQ ID NO: 46 or a functional variant thereof. In some cases, the endonuclease may comprise a RuvC_III domain, wherein the RuvC_III domain is substantially identical to SEQ ID NO: 46.

[0126] The endonuclease may comprise an HNH domain having at least about 70% identity to SEQ ID NO: 90 or a functional variant thereof. In some cases, the endonuclease may comprise an HNH domain having at least about 70%, at least about 75%, at least about 80%, at least about 85%, at least about 90%, at least about 91%, at least about 92%, at least about 93%, at least about 94%, at least about 95%, at least about 96%, at least about 97%, at least about 98%, or at least about 99% identical to SEQ ID NO: 90 or a functional variant thereof. The endonuclease may comprise an HNH domain substantially identical to SEQ ID NO: 90 or a functional variant thereof.

[0127] In some cases, the endonuclease may comprise a variant having at least about 30%, at least about 35%, at least about 40%, at least about 45%, at least about 50%, at least about 55%, at least about 60%, at least about 65%, at least about 70%, at least about 75%, at least about 80%, at least about 85%, at least about 90%, at least about 95%, at least about 96%, at least about 97%, at least about 98%, or at least about 99% identity to SEQ ID NO: 2 or a functional variant thereof. In some cases, the endonuclease may be substantially identical to SEQ ID NO: 2 or a functional variant thereof.

[0128] In some cases, the endonuclease may comprise a variant having one or more nuclear localization sequences (NLSs). The NLS may be proximal to the N- or C-terminus of said endonuclease. The NLS may be appended N-terminal or C-terminal to SEQ ID NO: 2, or to a functional variant having at least about 30%, at least about 35%, at least about 40%, at least about 45%, at least about 50%, at least about 55%, at least about 60%, at least about 65%, at least about 70%, at least about 75%, at least about 80%, at least about 85%, at least about 90%, at least about 95%, at least about 96%, at least about 97%, at least about 98%, or at least about 99% identity to SEQ ID NO: 2. The NLS may be an SV40 large T antigen NLS. The NLS may be a c-myc NLS. The NLS can comprise a sequence with at least about 80%, at least about 85%, at least about 90%, at least about 95%, at least about 99% identity to any one of SEQ ID NOs: 180-195 or a functional variant thereof. The NLS can comprise a sequence substantially identical to any one of SEQ ID NOs: 180-195 or a functional variant thereof. The NLS can comprise any of the sequences in Table 1 or a combination thereof:

[0129] In some cases, sequence identity may be determined by the BLASTP, CLUSTALW, MUSCLE, MAFFT, Novafold, or Smith-Waterman homology search algorithm. The sequence identity may be determined by the BLASTP algorithm using parameters of a wordlength (W) of 3, an expectation (E) of 10, and using a BLOSUM62 scoring matrix setting gap costs at existence of 11, extension of 1, and using a conditional compositional score matrix adjustment.

[0130] In some cases, the system above may comprise (b) at least one engineered synthetic guide ribonucleic acid (sgRNA) capable of forming a complex with the endonuclease bearing a 5′ targeting region complementary to a desired cleavage sequence. In some cases, the 5′ targeting region may comprises a PAM sequence compatible with the endonuclease. In some cases, the 5′ most nucleotide of the targeting region may be G. In some cases, the 5′ targeting region may be 15-23 nucleotides in length. The guide sequence and the tracr sequence may be supplied as separate ribonucleic acids (RNAs) or a single ribonucleic acid (RNA). The guide RNA may comprise a crRNA tracrRNA binding sequence 3′ to the targeting region. The guide RNA may comprise a tracrRNA sequence preceded by a 4-nucleotide linker 3′ to the crRNA tracrRNA binding region. The sgRNA may comprise, from 5′ to 3′: a non-natural guide nucleic acid sequence capable of hybridizing to a target sequence in a cell; and a tracr sequence. In some cases, the non-natural guide nucleic acid sequence and the tracr sequence are covalently linked.

[0131] In some cases, the tracr sequence may have a particular sequence. The tracr sequence may have at least about 80% to at least about 60-100 (e.g., at least about 60, at least about 65, at least about 70, at least about 75, at least about 80, at least about 85, or at least about 90) consecutive nucleotides of a natural tracrRNA sequence. The tracr sequence may have at least about 80% sequence identity to at least about 60-100 (e.g., at least about 60, at least about 65, at least about 70, at least about 75, at least about 80, at least about 85, or at least about 90) consecutive nucleotides of SEQ ID NO: 138 or a functional variant thereof. In some cases, the tracrRNA may be substantially identical to at least about 60-100 (e.g., at least about 60, at least about 65, at least about 70, at least about 75, at least about 80, at least about 85, or at least about 90) consecutive nucleotides of SEQ ID NO: 138 or a functional variant thereof. The tracrRNA may comprise SEQ ID NOs: 138.

[0132] In some cases, the at least one engineered synthetic guide ribonucleic acid (sgRNA) capable of forming a complex with the endonuclease may comprise a sequence having at least about 80% identity to SEQ ID NO: 133 or a functional variant thereof. The sgRNA may comprise a sequence having at least about 80%, at least about 85%, at least about 90%, at least about 91%, at least about 92%, at least about 93%, at least about 94%, at least about 95%, at least about 96%, at least about 97%, at least about 98%, or at least about 99% identity to SEQ ID NO: 133 or a functional variant thereof. The sgRNA may comprise a sequence substantially identical to SEQ ID NO: 133 or a functional variant thereof.

[0133] In some cases, the system above may comprise two different sgRNAs targeting a first region and a second region for cleavage in a target DNA locus, wherein the second region is 3′ to the first region. In some cases, the system above may comprise a single- or double-stranded DNA repair template comprising from 5′ to 3′: a first homology arm comprising a sequence of at least about 20 (e.g., at least about 40, 80, 120, 150, 200, 300, 500, or 1 kb) nucleotides 5′ to the first region, a synthetic DNA sequence of at least about 10 nucleotides, and a second homology arm comprising a sequence of at least about 20 (e.g., at least about 40, 80, 120, 150, 200, 300, 500, or 1 kb) nucleotides 3′ to the second region.

[0134] In another aspect, the present disclosure provides a method for modifying a target nucleic acid locus of interest. The method may comprise delivering to the target nucleic acid locus any of the non-natural systems disclosed herein, including an enzyme and at least one synthetic guide RNA (sgRNA) disclosed herein. The enzyme may form a complex with the at least one sgRNA, and upon binding of the complex to the target nucleic acid locus of interest, may modify the target nucleic acid locus of interest. Delivering the enzyme to said locus may comprise transfecting a cell with the system or nucleic acids encoding the system. Delivering the nuclease to said locus may comprise electroporating a cell with the system or nucleic acids encoding the system. Delivering the nuclease to said locus may comprise incubating the system in a buffer with a nucleic acid comprising the locus of interest. In some cases, the target nucleic acid locus comprises deoxyribonucleic acid (DNA) or ribonucleic acid (RNA). The target nucleic acid locus may comprise genomic DNA, viral DNA, viral RNA, or bacterial DNA. The target nucleic acid locus may be within a cell. The target nucleic acid locus may be in vitro. The target nucleic acid locus may be within a eukaryotic cell or a prokaryotic cell. The cell may be an animal cell, a human cell, bacterial cell, archaeal cell, or a plant cell. The enzyme may induce a single or double-stranded break at or proximal to the target locus of interest.

[0135] In cases where the target nucleic acid locus may be within a cell, the enzyme may be supplied as a nucleic acid containing an open reading frame encoding the enzyme having a RuvC_III domain having at least about 75% (e.g., at least about 90%, at least about 91%, at least about 92%, at least about 93%, at least about 94%, at least about 95%, at least about 96%, at least about 97%, at least about 98%, at least about 99%) identity to SEQ ID NOs: 46 or a functional variant thereof. In some cases, the nucleic acid comprises a promoter to which the open reading frame encoding the endonuclease is operably linked. The promoter may be a CMV, EF1a, SV40, PGK1, Ubc, human beta actin, CAG, TRE, or CaMKIIa promoter. The endonuclease may be supplied as a capped mRNA containing said open reading frame encoding said endonuclease. The endonuclease may be supplied as a translated polypeptide. The at least one engineered sgRNA may be supplied as deoxyribonucleic acid (DNA) containing a gene sequence encoding said at least one engineered sgRNA operably linked to a ribonucleic acid (RNA) pol III promoter. In some cases, the organism may be eukaryotic. In some cases, the organism may be fungal. In some cases, the organism may be human.

[0136] MG4 Enzymes

[0137] In one aspect, the present disclosure provides for an engineered nuclease system comprising (a) an endonuclease. In some cases, the endonuclease is a Cas endonuclease. In some cases, the endonuclease is a Type II, Class II Cas endonuclease. The endonuclease may comprise a RuvC_III domain, wherein said RuvC_III domain has at least about 70% sequence identity to any one of SEQ ID NOs: 48-71 or a functional variant thereof. In some cases, the endonuclease may comprise a RuvC_III domain, wherein the RuvC_III domain has at least about 20%, at least about 25%, at least about 30%, at least about 35%, at least about 40%, at least about 45%, at least about 50%, at least about 55%, at least about 60%, at least about 65%, at least about 70%, at least about 75%, at least about 80%, at least about 85%, at least about 90%, at least about 91%, at least about 92%, at least about 93%, at least about 94%, at least about 95%, at least about 96%, at least about 97%, at least about 98%, at least about 99% identity to any one of SEQ ID NOs: 48-71 or a functional variant thereof. In some cases, the endonuclease may comprise a RuvC_III domain, wherein the RuvC_III domain is substantially identical to any one of SEQ ID NOs: 48-71 or a functional variant thereof.

[0138] The endonuclease may comprise an HNH domain having at least about 70% identity to any one of SEQ ID NOs: 92-115 or a functional variant thereof. In some cases, the endonuclease may comprise an HNH domain having at least about 70%, at least about 75%, at least about 80%, at least about 85%, at least about 90%, at least about 91%, at least about 92%, at least about 93%, at least about 94%, at least about 95%, at least about 96%, at least about 97%, at least about 98%, or at least about 99% identical to any one of SEQ ID NOs: 92-115 or a functional variant thereof. The endonuclease may comprise an HNH domain substantially identical to any one of SEQ ID NOs: 92-115 or a functional variant thereof.

[0139] In some cases, the endonuclease may comprise a variant having at least about 30%, at least about 35%, at least about 40%, at least about 45%, at least about 50%, at least about 55%, at least about 60%, at least about 65%, at least about 70%, at least about 75%, at least about 80%, at least about 85%, at least about 90%, at least about 95%, at least about 96%, at least about 97%, at least about 98%, or at least about 99% identity to any one of SEQ ID NOs: 4-27 or a functional variant thereof. In some cases, the endonuclease may be substantially identical to any one of SEQ ID NOs: 4-27 or a functional variant thereof.

[0140] In some cases, the endonuclease may comprise a variant having one or more nuclear localization sequences (NLSs). The NLS may be proximal to the N- or C-terminus of said endonuclease. The NLS may be appended N-terminal or C-terminal to any one of SEQ ID NOs: 4-27, or to a functional variant having at least about 30%, at least about 35%, at least about 40%, at least about 45%, at least about 50%, at least about 55%, at least about 60%, at least about 65%, at least about 70%, at least about 75%, at least about 80%, at least about 85%, at least about 90%, at least about 95%, at least about 96%, at least about 97%, at least about 98%, or at least about 99% identity to any one of SEQ ID NOs: 4-27. The NLS may be an SV40 large T antigen NLS. The NLS may be a c-myc NLS. The NLS can comprise a sequence with at least about 80%, at least about 85%, at least about 90%, at least about 95%, at least about 99% identity to any one of SEQ ID NOs: 180-195 or a functional variant thereof. The NLS can comprise a sequence substantially identical to any one of SEQ ID NOs: 180-195 or a functional variant thereof. The NLS can comprise any of the sequences in Table 1 or a combination thereof.

[0141] In some cases, sequence identity may be determined by the BLASTP, CLUSTALW, MUSCLE, MAFFT, Novafold, or Smith-Waterman homology search algorithm. The sequence identity may be determined by the BLASTP algorithm using parameters of a wordlength (W) of 3, an expectation (E) of 10, and using a BLOSUM62 scoring matrix setting gap costs at existence of 11, extension of 1, and using a conditional compositional score matrix adjustment.

[0142] In some cases, the system above may comprise (b) at least one engineered synthetic guide ribonucleic acid (sgRNA) capable of forming a complex with the endonuclease bearing a 5′ targeting region complementary to a desired cleavage sequence. In some cases, the 5′ targeting region may comprises a PAM sequence compatible with the endonuclease. In some cases, the 5′ most nucleotide of the targeting region may be G. In some cases, the 5′ targeting region may be 15-23 nucleotides in length. The guide sequence and the tracr sequence may be supplied as separate ribonucleic acids (RNAs) or a single ribonucleic acid (RNA). The guide RNA may comprise a crRNA tracrRNA binding sequence 3′ to the targeting region. The guide RNA may comprise a tracrRNA sequence preceded by a 4-nucleotide linker 3′ to the crRNA tracrRNA binding region. The sgRNA may comprise, from 5′ to 3′: a non-natural guide nucleic acid sequence capable of hybridizing to a target sequence in a cell; and a tracr sequence. In some cases, the non-natural guide nucleic acid sequence and the tracr sequence are covalently linked.

[0143] In some cases, the tracr sequence may have a particular sequence. The tracr sequence may have at least about 80% to at least about 60-100 (e.g., at least about 60, at least about 65, at least about 70, at least about 75, at least about 80, at least about 85, or at least about 90) consecutive nucleotides of a natural tracrRNA sequence. The tracr sequence may have at least about 80% sequence identity to at least about 60-100 (e.g., at least about 60, at least about 65, at least about 70, at least about 75, at least about 80, at least about 85, or at least about 90) consecutive nucleotides of any one of SEQ ID NOs: 139-143 or a functional variant thereof. In some cases, the tracrRNA may be substantially identical to at least about 60-100 (e.g., at least about 60, at least about 65, at least about 70, at least about 75, at least about 80, at least about 85, or at least about 90) consecutive nucleotides of any one of SEQ ID NOs: 139-143 or a functional variant thereof. The tracrRNA may comprise any one of SEQ ID NOs: 139-143.

[0144] In some cases, the at least one engineered synthetic guide ribonucleic acid (sgRNA) capable of forming a complex with the endonuclease may comprise a sequence having at least about 80% identity to SEQ ID NO: 134 or a functional variant thereof. The sgRNA may comprise a sequence having at least about 80%, at least about 85%, at least about 90%, at least about 91%, at least about 92%, at least about 93%, at least about 94%, at least about 95%, at least about 96%, at least about 97%, at least about 98%, or at least about 99% identity to SEQ ID NO: 134 or a functional variant thereof. The sgRNA may comprise a sequence substantially identical to SEQ ID NO: 134 or a functional variant thereof.

[0145] In some cases, the system above may comprise two different sgRNAs or guide RNAs targeting a first region and a second region for cleavage in a target DNA locus, wherein the second region is 3′ to the first region. In some cases, the system above may comprise a single- or double-stranded DNA repair template comprising from 5′ to 3′: a first homology arm comprising a sequence of at least about 20 (e.g., at least about 40, 80, 120, 150, 200, 300, 500, or 1 kb) nucleotides 5′ to the first region, a synthetic DNA sequence of at least about 10 nucleotides, and a second homology arm comprising a sequence of at least about 20 (e.g., at least about 40, 80, 120, 150, 200, 300, 500, or 1 kb) nucleotides 3′ to the second region.

[0146] In another aspect, the present disclosure provides a method for modifying a target nucleic acid locus of interest. The method may comprise delivering to the target nucleic acid locus any of the non-natural systems disclosed herein, including an enzyme and at least one synthetic guide RNA (sgRNA) disclosed herein. The enzyme may form a complex with the at least one sgRNA, and upon binding of the complex to the target nucleic acid locus of interest, may modify the target nucleic acid locus of interest. Delivering the enzyme to said locus may comprise transfecting a cell with the system or nucleic acids encoding the system. Delivering the nuclease to said locus may comprise electroporating a cell with the system or nucleic acids encoding the system. Delivering the nuclease to said locus may comprise incubating the system in a buffer with a nucleic acid comprising the locus of interest. In some cases, the target nucleic acid locus comprises deoxyribonucleic acid (DNA) or ribonucleic acid (RNA). The target nucleic acid locus may comprise genomic DNA, viral DNA, viral RNA, or bacterial DNA. The target nucleic acid locus may be within a cell. The target nucleic acid locus may be in vitro. The target nucleic acid locus may be within a eukaryotic cell or a prokaryotic cell. The cell may be an animal cell, a human cell, bacterial cell, archaeal cell, or a plant cell. The enzyme may induce a single or double-stranded break at or proximal to the target locus of interest.

[0147] In cases where the target nucleic acid locus may be within a cell, the enzyme may be supplied as a nucleic acid containing an open reading frame encoding the enzyme having a RuvC_III domain having at least about 75% (e.g., at least about 90%, at least about 91%, at least about 92%, at least about 93%, at least about 94%, at least about 95%, at least about 96%, at least about 97%, at least about 98%, at least about 99%) identity to any one of SEQ ID NOs: 48-71 or a functional variant thereof. In some cases, the nucleic acid comprises a promoter to which the open reading frame encoding the endonuclease is operably linked. The promoter may be a CMV, EF1a, SV40, PGK1, Ubc, human beta actin, CAG, TRE, or CaMKIIa promoter. The endonuclease may be supplied as a capped mRNA containing said open reading frame encoding said endonuclease. The endonuclease may be supplied as a translated polypeptide. The at least one engineered sgRNA may be supplied as deoxyribonucleic acid (DNA) containing a gene sequence encoding said at least one engineered sgRNA operably linked to a ribonucleic acid (RNA) pol III promoter. In some cases, the organism may be eukaryotic. In some cases, the organism may be fungal. In some cases, the organism may be human.

[0148] MG6 Enzymes

[0149] In one aspect, the present disclosure provides for an engineered nuclease system comprising (a) an endonuclease. In some cases, the endonuclease is a Cas endonuclease. In some cases, the endonuclease is a Type II, Class II Cas endonuclease. The endonuclease may comprise a RuvC_III domain, wherein said RuvC_III domain has at least about 70% sequence identity to any one of SEQ ID NOs: 72-83 or 246-253 or a functional variant thereof. In some cases, the endonuclease may comprise a RuvC_III domain, wherein the RuvC_III domain has at least about 20%, at least about 25%, at least about 30%, at least about 35%, at least about 40%, at least about 45%, at least about 50%, at least about 55%, at least about 60%, at least about 65%, at least about 70%, at least about 75%, at least about 80%, at least about 85%, at least about 90%, at least about 91%, at least about 92%, at least about 93%, at least about 94%, at least about 95%, at least about 96%, at least about 97%, at least about 98%, at least about 99% identity to any one of SEQ ID NOs: 72-83 or 246-253 or a functional variant thereof. In some cases, the endonuclease may comprise a RuvC_III domain, wherein the RuvC_III domain is substantially identical to any one of SEQ ID NOs: 72-83 or 246-253 or a functional variant thereof.

[0150] The endonuclease may comprise an HNH domain having at least about 70% identity to any one of SEQ ID NOs: 116-127 or 263-270 or a functional variant thereof. In some cases, the endonuclease may comprise a HNH domain having at least about 70%, at least about 75%, at least about 80%, at least about 85%, at least about 90%, at least about 91%, at least about 92%, at least about 93%, at least about 94%, at least about 95%, at least about 96%, at least about 97%, at least about 98%, or at least about 99% identical to any one of SEQ ID NOs: 116-127 or 263-270 or a functional variant thereof. The endonuclease may comprise an HNH domain substantially identical to any one of SEQ ID NOs: 116-127 or 263-270 or a functional variant thereof.

[0151] In some cases, the endonuclease may comprise a variant having at least about 30%, at least about 35%, at least about 40%, at least about 45%, at least about 50%, at least about 55%, at least about 60%, at least about 65%, at least about 70%, at least about 75%, at least about 80%, at least about 85%, at least about 90%, at least about 95%, at least about 96%, at least about 97%, at least about 98%, or at least about 99% identity to any one of SEQ ID NOs: 28-39 or 229-236 or a functional variant thereof. In some cases, the endonuclease may be substantially identical to any one of SEQ ID NOs: 28-39 or 229-236 or a functional variant thereof.

[0152] In some cases, the endonuclease may comprise a variant having one or more nuclear localization sequences (NLSs). The NLS may be proximal to the N- or C-terminus of said endonuclease. The NLS may be appended N-terminal or C-terminal to any one of SEQ ID NOs: 28-39 or 229-236, or to a functional variant having at least about 30%, at least about 35%, at least about 40%, at least about 45%, at least about 50%, at least about 55%, at least about 60%, at least about 65%, at least about 70%, at least about 75%, at least about 80%, at least about 85%, at least about 90%, at least about 95%, at least about 96%, at least about 97%, at least about 98%, or at least about 99% identity to any one of SEQ ID NOs: 28-39 or 229-236. The NLS may be an SV40 large T antigen NLS. The NLS may be a c-myc NLS. The NLS can comprise a sequence with at least about 80%, at least about 85%, at least about 90%, at least about 95%, at least about 99% identity to any one of SEQ ID NOs: 180-195 or a functional variant thereof. The NLS can comprise a sequence substantially identical to any one of SEQ ID NOs: 180-195 or a functional variant thereof. The NLS can comprise any of the sequences in Table 1 or a combination thereof.

[0153] In some cases, sequence identity may be determined by the BLASTP, CLUSTALW, MUSCLE, MAFFT, Novafold, or Smith-Waterman homology search algorithm.

[0154] The sequence identity may be determined by the BLASTP algorithm using parameters of a wordlength (W) of 3, an expectation (E) of 10, and using a BLOSUM62 scoring matrix setting gap costs at existence of 11, extension of 1, and using a conditional compositional score matrix adjustment.

[0155] In some cases, the system above may comprise (b) at least one engineered synthetic guide ribonucleic acid (sgRNA) capable of forming a complex with the endonuclease bearing a 5′ targeting region complementary to a desired cleavage sequence. In some cases, the 5′ targeting region may comprises a PAM sequence compatible with the endonuclease. In some cases, the 5′ most nucleotide of the targeting region may be G. In some cases, the 5′ targeting region may be 15-23 nucleotides in length. The guide sequence and the tracr sequence may be supplied as separate ribonucleic acids (RNAs) or a single ribonucleic acid (RNA). The guide RNA may comprise a crRNA tracrRNA binding sequence 3′ to the targeting region. The guide RNA may comprise a tracrRNA sequence preceded by a 4-nucleotide linker 3′ to the crRNA tracrRNA binding region. The sgRNA may comprise, from 5′ to 3′: a non-natural guide nucleic acid sequence capable of hybridizing to a target sequence in a cell; and a tracr sequence. In some cases, the non-natural guide nucleic acid sequence and the tracr sequence are covalently linked.

[0156] In some cases, the tracr sequence may have a particular sequence. The tracr sequence may have at least about 80% to at least about 60-100 (e.g., at least about 60, at least about 65, at least about 70, at least about 75, at least about 80, at least about 85, or at least about 90) consecutive nucleotides of a natural tracrRNA sequence. The tracr sequence may have at least about 80% sequence identity to at least about 60-100 (e.g., at least about 60, at least about 65, at least about 70, at least about 75, at least about 80, at least about 85, or at least about 90) consecutive nucleotides of any one of SEQ ID NOs: 144-146 or a functional variant thereof. In some cases, the tracrRNA may be substantially identical to at least about 60-100 (e.g., at least about 60, at least about 65, at least about 70, at least about 75, at least about 80, at least about 85, or at least about 90) consecutive nucleotides of any one of SEQ ID NOs: 144-146 or a functional variant thereof. The tracrRNA may comprise any one of SEQ ID NOs: 144-146.

[0157] In some cases, the at least one engineered synthetic guide ribonucleic acid (sgRNA) capable of forming a complex with the endonuclease may comprise a sequence having at least about 80% identity to SEQ ID NO: 135 or a functional variant thereof. The sgRNA may comprise a sequence having at least about 80%, at least about 85%, at least about 90%, at least about 91%, at least about 92%, at least about 93%, at least about 94%, at least about 95%, at least about 96%, at least about 97%, at least about 98%, or at least about 99% identity to SEQ ID NO: 135 or a functional variant thereof. The sgRNA may comprise a sequence substantially identical to SEQ ID NO: 135 or a functional variant thereof.

[0158] In some cases, the system above may comprise two different sgRNAs or guide RNAs targeting a first region and a second region for cleavage in a target DNA locus, wherein the second region is 3′ to the first region. In some cases, the system above may comprise a single- or double-stranded DNA repair template comprising from 5′ to 3′: a first homology arm comprising a sequence of at least about 20 (e.g., at least about 40, 80, 120, 150, 200, 300, 500, or 1 kb) nucleotides 5′ to the first region, a synthetic DNA sequence of at least about 10 nucleotides, and a second homology arm comprising a sequence of at least about 20 (e.g., at least about 40, 80, 120, 150, 200, 300, 500, or 1 kb) nucleotides 3′ to the second region.

[0159] In another aspect, the present disclosure provides a method for modifying a target nucleic acid locus of interest. The method may comprise delivering to the target nucleic acid locus any of the non-natural systems disclosed herein, including an enzyme and at least one synthetic guide RNA (sgRNA) disclosed herein. The enzyme may form a complex with the at least one sgRNA, and upon binding of the complex to the target nucleic acid locus of interest, may modify the target nucleic acid locus of interest. Delivering the enzyme to said locus may comprise transfecting a cell with the system or nucleic acids encoding the system. Delivering the nuclease to said locus may comprise electroporating a cell with the system or nucleic acids encoding the system. Delivering the nuclease to said locus may comprise incubating the system in a buffer with a nucleic acid comprising the locus of interest. In some cases, the target nucleic acid locus comprises deoxyribonucleic acid (DNA) or ribonucleic acid (RNA). The target nucleic acid locus may comprise genomic DNA, viral DNA, viral RNA, or bacterial DNA. The target nucleic acid locus may be within a cell. The target nucleic acid locus may be in vitro. The target nucleic acid locus may be within a eukaryotic cell or a prokaryotic cell. The cell may be an animal cell, a human cell, bacterial cell, archaeal cell, or a plant cell. The enzyme may induce a single or double-stranded break at or proximal to the target locus of interest.

[0160] In cases where the target nucleic acid locus may be within a cell, the enzyme may be supplied as a nucleic acid containing an open reading frame encoding the enzyme having a RuvC_III domain having at least about 75% (e.g., at least about 90%, at least about 91%, at least about 92%, at least about 93%, at least about 94%, at least about 95%, at least about 96%, at least about 97%, at least about 98%, at least about 99%) identity to any one of SEQ ID NOs: 72-83 or 246-253 or a functional variant thereof. In some cases, the nucleic acid comprises a promoter to which the open reading frame encoding the endonuclease is operably linked. The promoter may be a CMV, EF1a, SV40, PGK1, Ubc, human beta actin, CAG, TRE, or CaMKIIa promoter. The endonuclease may be supplied as a capped mRNA containing said open reading frame encoding said endonuclease. The endonuclease may be supplied as a translated polypeptide. The at least one engineered sgRNA may be supplied as deoxyribonucleic acid (DNA) containing a gene sequence encoding said at least one engineered sgRNA operably linked to a ribonucleic acid (RNA) pol III promoter. In some cases, the organism may be eukaryotic. In some cases, the organism may be fungal. In some cases, the organism may be human.

[0161] MG7 Enzymes

[0162] In one aspect, the present disclosure provides for an engineered nuclease system comprising (a) an endonuclease. In some cases, the endonuclease is a Cas endonuclease. In some cases, the endonuclease is a Type II, Class II Cas endonuclease. The endonuclease may comprise a RuvC_III domain, wherein said RuvC_III domain has at least about 70% sequence identity to any one of SEQ ID NOs: 84-86 or 254-262 or a functional variant thereof. In some cases, the endonuclease may comprise a RuvC_III domain, wherein the RuvC_III domain has at least about 20%, at least about 25%, at least about 30%, at least about 35%, at least about 40%, at least about 45%, at least about 50%, at least about 55%, at least about 60%, at least about 65%, at least about 70%, at least about 75%, at least about 80%, at least about 85%, at least about 90%, at least about 91%, at least about 92%, at least about 93%, at least about 94%, at least about 95%, at least about 96%, at least about 97%, at least about 98%, at least about 99% identity to any one of SEQ ID NOs: 84-86 or 254-262 or a functional variant thereof. In some cases, the endonuclease may comprise a RuvC_III domain, wherein the RuvC_III domain is substantially identical to any one of SEQ ID NOs: 84-86 or 254-262 or a functional variant thereof.

[0163] The endonuclease may comprise an HNH domain having at least about 70% identity to any one of SEQ ID NOs: 128-130 or 271-279 or a functional variant thereof. In some cases, the endonuclease may comprise a HNH domain having at least about 70%, at least about 75%, at least about 80%, at least about 85%, at least about 90%, at least about 91%, at least about 92%, at least about 93%, at least about 94%, at least about 95%, at least about 96%, at least about 97%, at least about 98%, or at least about 99% identical to any one of SEQ ID NOs: SEQ ID NOs: 128-130 or 271-279 or a functional variant thereof. The endonuclease may comprise an HNH domain substantially identical to any one of SEQ ID NOs: SEQ ID NOs: 128-130 or 271-279 or a functional variant thereof.

[0164] In some cases, the endonuclease may comprise a variant having at least about 30%, at least about 35%, at least about 40%, at least about 45%, at least about 50%, at least about 55%, at least about 60%, at least about 65%, at least about 70%, at least about 75%, at least about 80%, at least about 85%, at least about 90%, at least about 95%, at least about 96%, at least about 97%, at least about 98%, or at least about 99% identity to any one of SEQ ID NOs: 40-42 or 237-245 or a functional variant thereof. In some cases, the endonuclease may be substantially identical to any one of SEQ ID NOs: SEQ ID NOs: 40-42 or 237-245 or a functional variant thereof.

[0165] In some cases, the endonuclease may comprise a variant having one or more nuclear localization sequences (NLSs). The NLS may be proximal to the N- or C-terminus of said endonuclease. The NLS may be appended N-terminal or C-terminal to any one of SEQ ID NOs: 40-42 or 237-245, or to a functional variant having at least about 30%, at least about 35%, at least about 40%, at least about 45%, at least about 50%, at least about 55%, at least about 60%, at least about 65%, at least about 70%, at least about 75%, at least about 80%, at least about 85%, at least about 90%, at least about 95%, at least about 96%, at least about 97%, at least about 98%, or at least about 99% identity to any one of SEQ ID NOs: 40-42 or 237-245. The NLS may be an SV40 large T antigen NLS. The NLS may be a c-myc NLS. The NLS can comprise a sequence with at least about 80%, at least about 85%, at least about 90%, at least about 95%, at least about 99% identity to any one of SEQ ID NOs: 180-195 or a functional variant thereof. The NLS can comprise a sequence substantially identical to any one of SEQ ID NOs: 180-195 or a functional variant thereof. The NLS can comprise any of the sequences in Table 1 or a combination thereof.

[0166] In some cases, sequence identity may be determined by the BLASTP, CLUSTALW, MUSCLE, MAFFT, Novafold, or Smith-Waterman homology search algorithm. The sequence identity may be determined by the BLASTP algorithm using parameters of a wordlength (W) of 3, an expectation (E) of 10, and using a BLOSUM62 scoring matrix setting gap costs at existence of 11, extension of 1, and using a conditional compositional score matrix adjustment.

[0167] In some cases, the system above may comprise (b) at least one engineered synthetic guide ribonucleic acid (sgRNA) capable of forming a complex with the endonuclease bearing a 5′ targeting region complementary to a desired cleavage sequence. In some cases, the 5′ targeting region may comprises a PAM sequence compatible with the endonuclease. In some cases, the 5′ most nucleotide of the targeting region may be G. In some cases, the 5′ targeting region may be 15-23 nucleotides in length. The guide sequence and the tracr sequence may be supplied as separate ribonucleic acids (RNAs) or a single ribonucleic acid (RNA). The guide RNA may comprise a crRNA tracrRNA binding sequence 3′ to the targeting region. The guide RNA may comprise a tracrRNA sequence preceded by a 4-nucleotide linker 3′ to the crRNA tracrRNA binding region. The sgRNA may comprise, from 5′ to 3′: a non-natural guide nucleic acid sequence capable of hybridizing to a target sequence in a cell; and a tracr sequence. In some cases, the non-natural guide nucleic acid sequence and the tracr sequence are covalently linked.

[0168] In some cases, the tracr sequence may have a particular sequence. The tracr sequence may have at least about 80% to at least about 60-100 (e.g., at least about 60, at least about 65, at least about 70, at least about 75, at least about 80, at least about 85, or at least about 90) consecutive nucleotides of a natural tracrRNA sequence. The tracr sequence may have at least about 80% sequence identity to at least about 60-100 (e.g., at least about 60, at least about 65, at least about 70, at least about 75, at least about 80, at least about 85, or at least about 90) consecutive nucleotides of any one of SEQ ID NOs: 147 or 280 or a functional variant thereof. In some cases, the tracrRNA may be substantially identical to at least about 60-100 (e.g., at least about 60, at least about 65, at least about 70, at least about 75, at least about 80, at least about 85, or at least about 90) consecutive nucleotides of any one of SEQ ID NOs: 147 or 280 or a functional variant thereof. The tracrRNA may comprise any one of SEQ ID NOs: 147 or 280.

[0169] In some cases, the at least one engineered synthetic guide ribonucleic acid (sgRNA) capable of forming a complex with the endonuclease may comprise a sequence having at least about 80% identity to SEQ ID NO: 136 or a functional variant thereof. The sgRNA may comprise a sequence having at least about 80%, at least about 85%, at least about 90%, at least about 91%, at least about 92%, at least about 93%, at least about 94%, at least about 95%, at least about 96%, at least about 97%, at least about 98%, or at least about 99% identity to SEQ ID NO: 136 or a functional variant thereof. The sgRNA may comprise a sequence substantially identical to SEQ ID NO: 136 or a functional variant thereof.

[0170] In some cases, the system above may comprise two different sgRNAs or guide RNAs targeting a first region and a second region for cleavage in a target DNA locus, wherein the second region is 3′ to the first region. In some cases, the system above may comprise a single- or double-stranded DNA repair template comprising from 5′ to 3′: a first homology arm comprising a sequence of at least about 20 (e.g., at least about 40, 80, 120, 150, 200, 300, 500, or 1 kb) nucleotides 5′ to the first region, a synthetic DNA sequence of at least about 10 nucleotides, and a second homology arm comprising a sequence of at least about 20 (e.g., at least about 40, 80, 120, 150, 200, 300, 500, or 1 kb) nucleotides 3′ to the second region.

[0171] In another aspect, the present disclosure provides a method for modifying a target nucleic acid locus of interest. The method may comprise delivering to the target nucleic acid locus any of the non-natural systems disclosed herein, including an enzyme and at least one synthetic guide RNA (sgRNA) disclosed herein. The enzyme may form a complex with the at least one sgRNA, and upon binding of the complex to the target nucleic acid locus of interest, may modify the target nucleic acid locus of interest. Delivering the enzyme to said locus may comprise transfecting a cell with the system or nucleic acids encoding the system. Delivering the nuclease to said locus may comprise electroporating a cell with the system or nucleic acids encoding the system. Delivering the nuclease to said locus may comprise incubating the system in a buffer with a nucleic acid comprising the locus of interest. In some cases, the target nucleic acid locus comprises deoxyribonucleic acid (DNA) or ribonucleic acid (RNA). The target nucleic acid locus may comprise genomic DNA, viral DNA, viral RNA, or bacterial DNA. The target nucleic acid locus may be within a cell. The target nucleic acid locus may be in vitro. The target nucleic acid locus may be within a eukaryotic cell or a prokaryotic cell. The cell may be an animal cell, a human cell, bacterial cell, archaeal cell, or a plant cell. The enzyme may induce a single or double-stranded break at or proximal to the target locus of interest.

[0172] In cases where the target nucleic acid locus may be within a cell, the enzyme may be supplied as a nucleic acid containing an open reading frame encoding the enzyme having a RuvC_III domain having at least about 75% (e.g., at least about 90%, at least about 91%, at least about 92%, at least about 93%, at least about 94%, at least about 95%, at least about 96%, at least about 97%, at least about 98%, at least about 99%) identity to any one of SEQ ID NOs: 84-86 or 254-262 or a functional variant thereof. In some cases, the nucleic acid comprises a promoter to which the open reading frame encoding the endonuclease is operably linked. The promoter may be a CMV, EF1a, SV40, PGK1, Ubc, human beta actin, CAG, TRE, or CaMKIIa promoter. The endonuclease may be supplied as a capped mRNA containing said open reading frame encoding said endonuclease. The endonuclease may be supplied as a translated polypeptide. The at least one engineered sgRNA may be supplied as deoxyribonucleic acid (DNA) containing a gene sequence encoding said at least one engineered sgRNA operably linked to a ribonucleic acid (RNA) pol III promoter. In some cases, the organism may be eukaryotic. In some cases, the organism may be fungal. In some cases, the organism may be human.

[0173] MG16 Enzymes

[0174] In one aspect, the present disclosure provides for an engineered nuclease system comprising (a) an endonuclease. In some cases, the endonuclease is a Cas endonuclease. In some cases, the endonuclease is a Type II, Class II Cas endonuclease. The endonuclease may comprise a RuvC_III domain, wherein said RuvC_III domain has at least about 70% sequence identity to any one of SEQ ID NOs: 87-88 or a functional variant thereof. In some cases, the endonuclease may comprise a RuvC_III domain, wherein the RuvC_III domain has at least about 20%, at least about 25%, at least about 30%, at least about 35%, at least about 40%, at least about 45%, at least about 50%, at least about 55%, at least about 60%, at least about 65%, at least about 70%, at least about 75%, at least about 80%, at least about 85%, at least about 90%, at least about 91%, at least about 92%, at least about 93%, at least about 94%, at least about 95%, at least about 96%, at least about 97%, at least about 98%, at least about 99% identity to any one of SEQ ID NOs: 87-88 or a functional variant thereof. In some cases, the endonuclease may comprise a RuvC_III domain, wherein the RuvC_III domain is substantially identical to any one of SEQ ID NOs: 87-88 or a functional variant thereof.

[0175] The endonuclease may comprise an HNH domain having at least about 70% identity to any one of SEQ ID NOs: 131-132 or a functional variant thereof. In some cases, the endonuclease may comprise an HNH domain having at least about 70%, at least about 75%, at least about 80%, at least about 85%, at least about 90%, at least about 91%, at least about 92%, at least about 93%, at least about 94%, at least about 95%, at least about 96%, at least about 97%, at least about 98%, or at least about 99% identical to any one of SEQ ID NOs: 131-132 or a functional variant thereof. The endonuclease may comprise an HNH domain substantially identical to any one of SEQ ID NOs: 131-132 or a functional variant thereof.

[0176] In some cases, the endonuclease may comprise a variant having at least about 30%, at least about 35%, at least about 40%, at least about 45%, at least about 50%, at least about 55%, at least about 60%, at least about 65%, at least about 70%, at least about 75%, at least about 80%, at least about 85%, at least about 90%, at least about 95%, at least about 96%, at least about 97%, at least about 98%, or at least about 99% identity to any one of SEQ ID NOs: 43-44 or a functional variant thereof. In some cases, the endonuclease may be substantially identical to any one of SEQ ID NOs: SEQ ID NOs: 43-44 or a functional variant thereof.

[0177] In some cases, the endonuclease may comprise a variant having one or more nuclear localization sequences (NLSs). The NLS may be proximal to the N- or C-terminus of said endonuclease. The NLS may be appended N-terminal or C-terminal to any one of SEQ ID NOs: 43-44, or to a functional variant having at least about 30%, at least about 35%, at least about 40%, at least about 45%, at least about 50%, at least about 55%, at least about 60%, at least about 65%, at least about 70%, at least about 75%, at least about 80%, at least about 85%, at least about 90%, at least about 95%, at least about 96%, at least about 97%, at least about 98%, or at least about 99% identity to any one of SEQ ID NOs: 43-44. The NLS may be an SV40 large T antigen NLS. The NLS may be a c-myc NLS. The NLS can comprise a sequence with at least about 80%, at least about 85%, at least about 90%, at least about 95%, at least about 99% identity to any one of SEQ ID NOs: 180-195 or a functional variant thereof. The NLS can comprise a sequence substantially identical to any one of SEQ ID NOs: 180-195 or a functional variant thereof. The NLS can comprise any of the sequences in Table 1 or a combination thereof.

[0178] In some cases, sequence identity may be determined by the BLASTP, CLUSTALW, MUSCLE, MAFFT, Novafold, or Smith-Waterman homology search algorithm. The sequence identity may be determined by the BLASTP algorithm using parameters of a wordlength (W) of 3, an expectation (E) of 10, and using a BLOSUM62 scoring matrix setting gap costs at existence of 11, extension of 1, and using a conditional compositional score matrix adjustment.

[0179] In some cases, the system above may comprise (b) at least one engineered synthetic guide ribonucleic acid (sgRNA) capable of forming a complex with the endonuclease bearing a 5′ targeting region complementary to a desired cleavage sequence. In some cases, the 5′ targeting region may comprises a PAM sequence compatible with the endonuclease. In some cases, the 5′ most nucleotide of the targeting region may be G. In some cases, the 5′ targeting region may be 15-23 nucleotides in length. The guide sequence and the tracr sequence may be supplied as separate ribonucleic acids (RNAs) or a single ribonucleic acid (RNA). The guide RNA may comprise a crRNA tracrRNA binding sequence 3′ to the targeting region. The guide RNA may comprise a tracrRNA sequence preceded by a 4-nucleotide linker 3′ to the crRNA tracrRNA binding region. The sgRNA may comprise, from 5′ to 3′: a non-natural guide nucleic acid sequence capable of hybridizing to a target sequence in a cell; and a tracr sequence. In some cases, the non-natural guide nucleic acid sequence and the tracr sequence are covalently linked.

[0180] In some cases, the tracr sequence may have a particular sequence. The tracr sequence may have at least about 80% to at least about 60-100 (e.g., at least about 60, at least about 65, at least about 70, at least about 75, at least about 80, at least about 85, or at least about 90) consecutive nucleotides of a natural tracrRNA sequence. The tracr sequence may have at least about 80% sequence identity to at least about 60-100 (e.g., at least about 60, at least about 65, at least about 70, at least about 75, at least about 80, at least about 85, or at least about 90) consecutive nucleotides of SEQ ID NO: 148 or a functional variant thereof. In some cases, the tracrRNA may be substantially identical to at least about 60-100 (e.g., at least about 60, at least about 65, at least about 70, at least about 75, at least about 80, at least about 85, or at least about 90) consecutive nucleotides of SEQ ID NO: 148 or a functional variant thereof. The tracrRNA may comprise SEQ ID NO: 148.

[0181] In some cases, the at least one engineered synthetic guide ribonucleic acid (sgRNA) capable of forming a complex with the endonuclease may comprise a sequence having at least about 80% identity to SEQ ID NO: 137 or a functional variant thereof. The sgRNA may comprise a sequence having at least about 80%, at least about 85%, at least about 90%, at least about 91%, at least about 92%, at least about 93%, at least about 94%, at least about 95%, at least about 96%, at least about 97%, at least about 98%, or at least about 99% identity to SEQ ID NO: 137 or a functional variant thereof. The sgRNA may comprise a sequence substantially identical to SEQ ID NO: 137 or a functional variant thereof.

[0182] In some cases, the system above may comprise two different sgRNAs or guide RNAs targeting a first region and a second region for cleavage in a target DNA locus, wherein the second region is 3′ to the first region. In some cases, the system above may comprise a single- or double-stranded DNA repair template comprising from 5′ to 3′: a first homology arm comprising a sequence of at least about 20 (e.g., at least about 40, 80, 120, 150, 200, 300, 500, or 1 kb) nucleotides 5′ to the first region, a synthetic DNA sequence of at least about 10 nucleotides, and a second homology arm comprising a sequence of at least about 20 (e.g., at least about 40, 80, 120, 150, 200, 300, 500, or 1 kb) nucleotides 3′ to the second region.

[0183] In another aspect, the present disclosure provides a method for modifying a target nucleic acid locus of interest. The method may comprise delivering to the target nucleic acid locus any of the non-natural systems disclosed herein, including an enzyme and at least one synthetic guide RNA (sgRNA) disclosed herein. The enzyme may form a complex with the at least one sgRNA, and upon binding of the complex to the target nucleic acid locus of interest, may modify the target nucleic acid locus of interest. Delivering the enzyme to said locus may comprise transfecting a cell with the system or nucleic acids encoding the system. Delivering the nuclease to said locus may comprise electroporating a cell with the system or nucleic acids encoding the system. Delivering the nuclease to said locus may comprise incubating the system in a buffer with a nucleic acid comprising the locus of interest. In some cases, the target nucleic acid locus comprises deoxyribonucleic acid (DNA) or ribonucleic acid (RNA). The target nucleic acid locus may comprise genomic DNA, viral DNA, viral RNA, or bacterial DNA. The target nucleic acid locus may be within a cell. The target nucleic acid locus may be in vitro. The target nucleic acid locus may be within a eukaryotic cell or a prokaryotic cell. The cell may be an animal cell, a human cell, bacterial cell, archaeal cell, or a plant cell. The enzyme may induce a single or double-stranded break at or proximal to the target locus of interest.

[0184] In cases where the target nucleic acid locus may be within a cell, the enzyme may be supplied as a nucleic acid containing an open reading frame encoding the enzyme having a RuvC_III domain having at least about 75% (e.g., at least about 90%, at least about 91%, at least about 92%, at least about 93%, at least about 94%, at least about 95%, at least about 96%, at least about 97%, at least about 98%, at least about 99%) identity to any one of SEQ ID NOs: 87-88 or a functional variant thereof. In some cases, the nucleic acid comprises a promoter to which the open reading frame encoding the endonuclease is operably linked. The promoter may be a CMV, EF1a, SV40, PGK1, Ubc, human beta actin, CAG, TRE, or CaMKIIa promoter. The endonuclease may be supplied as a capped mRNA containing said open reading frame encoding said endonuclease. The endonuclease may be supplied as a translated polypeptide. The at least one engineered sgRNA may be supplied as deoxyribonucleic acid (DNA) containing a gene sequence encoding said at least one engineered sgRNA operably linked to a ribonucleic acid (RNA) pol III promoter. In some cases, the organism may be eukaryotic. In some cases, the organism may be fungal. In some cases, the organism may be human.

### EXAMPLES

### Example 1. —Metagenomic Analysis for New Proteins

[0185] Metagenomic samples were collected from sediment and soil. Deoxyribonucleic acid (DNA) was extracted with a Zymobiomics DNA mini-prep kit and sequenced on an Illumina HiSeq® 2500. Where samples were collected, samples were collected with consent of property owners. Hidden Markov Models were generated based on known Cas protein sequences including type II Cas effector proteins and these models were used to search the metagenomic data. Novel effector proteins identified by the search were further screened for predicted activity by alignments to known proteins. This metagenomic workflow resulted in MG1, MG2, MG4, MG6, MG7, and MG16 families of class II, type II CRISPR endonucleases described herein.

### Example 2.—Discovery of an MG6 Family of CRISPR Systems

[0186] Analysis of the data from the metagenomic analysis of Example 1 revealed a new cluster of previously undescribed putative CRISPR systems comprising six members (MG6-1, MG6-2, MG6-3, MG6-4, MG6-5, and MG6-6). The operon structure for this new family of systems is depicted in FIG. 3. The corresponding protein and nucleic acid sequences for these new enzymes and their relevant subdomains are presented the sequence listing filed herewith. Based on their location relative to the other genes, putative tracrRNA sequences were identified in the operon and are presented in the sequence listing filed herewith. A detailed domain-level alignment of these sequences versus Cas9 as outlined in Shmakov et al. (Mol Cell. 2015 Nov. 5; 60(3):385-97.), which is entirely incorporated by reference here is depicted in FIGS. 4A-4C. Detailed domain level-alignment of MG6-1 through MG6-6 is presented in FIGS. 5A-5K.

[0187] An additional comparison of MG6-1, MG6-2, MG6-3, MG6-4, MG6-5, and MG6-6 within the dataset revealed additional protein sequences with similar architecture, presented as SEQ NOs: 34-39.

### Example 3.—Prophetic—Determination of Protospacer-Adjacent Motif

[0188] Experiments are performed as in any of the examples in Karvelis et al. Methods. 2017 May 15; 121-122:3-8, which is entirely incorporated by reference here to identify the protospacer adjacent motif (PAM) sequence specificity for the novel enzymes described herein to allow for optimal synthetic sequence targeting.

[0189] In one example (in-vivo screen), cells bearing plasmids encoding any of the enzymes described herein and protospacer-targeting guide RNA are co-transformed with a plasmid library containing an antibiotic resistance gene, and a protospacer sequence flanked by a randomized PAM sequence. Plasmids containing functional PAMs are cleaved by the enzyme, leading to cell death. Deep-sequencing of the enzyme cleavage-resistant plasmid pool isolated from the surviving cells displays a set of depleted plasmids that contain functional cleavage-permitting PAMs.

[0190] In another example (in vitro screen), PAM library in the form of DNA plasmid or concatemeric repeats is subjected to cleavage by the RNP complex (e.g. including the enzyme, tracrRNA and crRNA or the enzyme and hybrid sgRNA) assembled in vitro or in cell lysates. Resulting free DNA ends resulting from successful cleavage events are captured by adapter ligation, followed by the PCR amplification of the PAM-sided products. Amplified library of functional PAMs is subjected to deep sequencing and PAMs licensing DNA cleavage are identified.

### Example 4.—Prophetic—Use of Synthetic CRISPR System as Described Herein in a Mammalian Cell for Genome Editing

[0191] DNA/RNA sequences encoding (i) an ORF encoding codon-optimized enzyme under a cell-compatible promoter with a cell-compatible C-terminal nuclear localization sequence (e.g. SV40 NLS in the case of human cells) and a suitable polyadenylation signal (e.g. TK pA signal in the case of human cells); and (ii) an ORF encoding an sgRNA (having a 5′ sequence beginning with G followed by 20 nt of a complementary targeting nucleic acid sequence targeting genomic DNA followed by a corresponding compatible PAM identified via Example 3 and a 3′ tracr-binding sequence, a linker, and the tracrRNA sequence) under a suitable Polymerase III promoter (e.g. the U6 promoter in mammalian cells) are prepared. In some embodiments, these sequences are prepared on the same or separate plasmid vectors, which are transfected via a suitable technique into eukaryotic cells. In some embodiments, these sequences are prepared as separate DNA sequences, which are transfected or microinjected into cells. In some embodiments, these sequences are prepared as synthesized RNAs or in-vitro transcribed RNAs which are transfected or microinjected into cells. In some embodiments, these sequences are translated into proteins and transfected or microinjected into cells.

[0192] Whichever transfection method is selected, (i) and (ii) are introduced into cells. A period of incubation is allowed to pass so that the enzyme and/or sgRNA can be transcribed and/or translated into active form. After the incubation period, genomic DNA in the vicinity of the targeting sequence is analyzed (e.g., by sequencing). An indel is introduced into the genomic DNA in the vicinity of the targeting sequence as a result of enzyme-mediated cleavage and non-homologous end joining.

[0193] In some embodiments, (i) and (ii) are introduced into cells with a third repair nucleotide that encodes regions of the genome flanking the cleavage site of sizes 25 bp or larger, which will facilitate homology directed repair. Containing within these flanking sequences may be a single base pair mutation, a functional gene fragment, a foreign or native gene for expression, or several genes composing a biochemical pathway.

### Example 5.—Prophetic—Use of Synthetic CRISPR System as Described Herein In Vitro

[0194] Any of the enzymes described herein are cloned into a suitable E. coli expression plasmid containing a purification tag and are recombinantly expressed in E. coli and purified using the recombinant tag. RNAs comprising a 5′ G followed by a 20 nt targeting sequence and PAM sequence, a tracrRNA binding region of a compatible crRNA, a GAAA linker, and a compatible tracrRNA are synthesized by suitable solid-phase RNA synthesis methods. Recombinant enzymes and sgRNA are combined in a suitable cleavage buffer containing Mg2+(e.g., 20 mM HEPES pH 7.5, 100 mM KCl, 5 mM MgCl2, 1 mM TCEPDTT, 5% glycerol) and the reaction is initiated by introducing a target DNA including a sequence complementary to the targeting sequence and PAM sequence. Cleavage of the DNA is monitored by a suitable assay (e.g., agarose gel electrophoresis followed by ethidium bromide (or similarly acting DNA-intercalating agent) staining and UV visualization).

### Example 6.—(General Protocol) PAM Sequence Identification/Confirmation for the Endonucleases Described Herein

[0195] PAM sequences were determined by sequencing plasmids containing randomly-generated PAM sequences that could be cleaved by putative endonucleases expressed in an E. coli lysate-based expression system (myTXTL, Arbor Biosciences). In this system, an E. coli codon optimized nucleotide sequence was transcribed and translated from a PCR fragment under control of a T7 promoter. A second PCR fragment with a tracr sequence under a T7 promoter and a minimal CRISPR array composed of a T7 promoter followed by a repeat-spacer-repeat sequence was transcribed in the same reaction. Successful expression of the endonuclease and tracr sequence in the TXTL system followed by CRISPR array processing provided active in vitro CRISPR nuclease complexes.

[0196] A library of target plasmids containing a spacer sequence matching that in the minimal array followed by 8N mixed bases (putative PAM sequences) was incubated with the output of the TXTL reaction. After 1-3 hr, the reaction was stopped and the DNA was recovered via a DNA clean-up kit, e.g., Zymo DCC, AMPure XP beads, QiaQuick etc. Adapter sequences were blunt-end ligated to DNA with active PAM sequences that had been cleaved by the endonuclease, whereas DNA that had not been cleaved was inaccessible for ligation. DNA segments comprising active PAM sequences were then amplified by PCR with primers specific to the library and the adapter sequence. The PCR amplification products were resolved on a gel to identify amplicons that corresponded to cleavage events. The amplified segments of the cleavage reaction were also used as template for preparation of an NGS library. Sequencing this resulting library, which was a subset of the starting 8N library, revealed the sequences which contain the correct PAM for the active CRISPR complex. For PAM testing with a single RNA construct, the same procedure was repeated except that an in vitro transcribed RNA was added along with the plasmid library and the tracr/minimal CRISPR array template was omitted. For endonucleases where NGS libraries were prepared, seqLogo (see e.g., Huber et al. Nat Methods. 2015 February; 12(2):115-21) representations were constructed and are presented in FIGS. 17, 18, and 19. The seqLogo module used to construct these representations takes the position weight matrix of a DNA sequence motif (e.g. a PAM sequence) and plots the corresponding sequence logo as introduced by Schneider and Stephens (see e.g. Schneider et al. Nucleic Acids Res. 1990 Oct. 25; 18(20):6097-100. The characters representing the sequence in the seqLogo representations have been stacked on top of each other for each position in the aligned sequences (e.g. PAM sequences). The height of each letter is proportional to its frequency, and the letters have been sorted so the most common one is on top.

### Example 7.—(General Protocol) RNA Folding of tracrRNA and sgRNA Structures

[0197] Folded structures of guide RNA sequences at 37° C. were computed using the method of Andronescu et al. Bioinformatics. 2007 Jul. 1; 23(13):i19-28, which is incorporated by reference herein in its entirety. Predicted structures of exemplary sgRNAs described herein are presented in FIGS. 15 and 16.

### Example 8.—(General Protocol) In Vitro Cleavage Efficiency of MG CRISPR Complexes

[0198] Endonucleases were expressed as His-tagged fusion proteins from an inducible T7 promoter in a protease deficient E. coli B strain. Cells expressing the His-tagged proteins were lysed by sonication and the His-tagged proteins were purified by Ni-NTA affinity chromatography on a HisTrap FF column (GE Lifescience) on an AKTA Avant FPLC (GE Lifescience). The eluate was resolved by SDS-PAGE on acrylamide gels (Bio-Rad) and stained with InstantBlue Ultrafast coomassie (Sigma-Aldrich). Purity was determined using densitometry of the protein band with ImageLab software (Bio-Rad). Purified endonucleases were dialyzed into a storage buffer composed of 50 mM Tris-HCl, 300 mM NaCl, 1 mM TCEP, 5% glycerol; pH 7.5 and stored at −80° C.

[0199] Target DNAs containing spacer sequences and PAM sequences (determined e.g., as in Example 6) were constructed by DNA synthesis. A single representative PAM was chosen for testing when the PAM had degenerate bases. The target DNAs comprised 2200 bp of linear DNA derived from a plasmid via PCR amplification with a PAM and spacer located 700 bp from one end. Successful cleavage resulted in fragments of 700 and 1500 bp. The target DNA, in vitro transcribed single RNA, and purified recombinant protein were combined in cleavage buffer (10 mM Tris, 100 mM NaCl, 10 mM MgCl₂) with an excess of protein and RNA and incubated for 5 minutes to 3 hours, usually 1 hr. The reaction was stopped via addition of RNAse A and incubation at 60 minutes. The reaction was then resolved on a 1.2% TAE agarose gel and the fraction of cleaved target DNA is quantified in ImageLab software.

### Example 9.—(General Protocol) Testing of Genome Cleavage Activity of MG CRISPR Complexes in E. coli

[0200] E. coli lacks the capacity to efficiently repair double-stranded DNA breaks. Thus, cleavage of genomic DNA can be a lethal event. Exploiting this phenomenon, endonuclease activity was tested in E. coli by recombinantly expressing an endonuclease and a tracrRNA in a target strain with spacer/target and PAM sequences integrated into its genomic DNA.

[0201] In this assay, the PAM sequence is specific for the endonuclease being tested as determined by the methods described in Example 6. sgRNA sequences were determined based upon the sequence and predicted structure of the tracrRNA. Repeat-anti-repeat pairings of 8-12 bp (generally 10 bp) were chosen, starting from the 5′ end of the repeat. The remaining 3′ end of the repeat and 5′ end of the tracrRNA were replaced with a tetraloop. Generally, the tetraloop was GAAA, but other tetraloops can be used, particularly if the GAAA sequence is predicted to interfere with folding. In these cases, a TTCG tetraloop was used.

[0202] Engineered strains with PAM sequences integrated into their genomic DNA were transformed with DNA encoding the endonuclease. Transformants were then made chemocompetent and transformed with 50 ng of single guide RNAs either specific to the target sequence (“on target”), or non-specific to the target (“off target”). After heat shock, transformations were recovered in SOC for 2 hrs at 37° C. Nuclease efficiency was then determined by a 5-fold dilution series grown on induction media. Colonies were quantified from the dilution series in triplicate.

### Example 10.—(General Protocol) Testing of Genome Cleavage Activity of MG CRISPR Complexes in Mammalian Cells

[0203] To confirm targeting and cleavage activity in mammalian cells, the MG Cas endonucleases were tested in two mammalian expression vectors: (a) one with a C-terminal SV40 NLS and a 2A-GFP tag, and (b) one with no GFP tag and two SV40 NLS sequences, one on the N-terminus and one on the C-terminus. In some instances, nucleotide sequences encoding the endonucleases were codon-optimized for expression in mammalian cells.

[0204] The corresponding single guide RNA sequence (sgRNA) with targeting sequence attached is cloned into a second mammalian expression vector. The two plasmids are cotransfected into HEK293T cells. 72 hr after co-transfection of the expression plasmid and a sgRNA targeting plasmid into HEK293T cells, the DNA is extracted and used for the preparation of an NGS-library. Percent NHEJ is measured via indels in the sequencing of the target site to demonstrate the targeting efficiency of the enzyme in mammalian cells. At least 10 different target sites were chosen to test each protein's activity.

### Example 11.—Characterization of MG4 Family Members

[0205] PAM Specificity, tracrRNA/sgRNA Validation

[0206] The targeted endonuclease activity of MG4 family endonuclease systems was confirmed using the myTXTL system as described in Example 6. In this assay, PCR amplification of cleaved target plasmids yields a product that migrates at approximately 170 bp in the gel, as shown in FIGS. 6-9. Amplification products were observed for MG4-2 (dual guide: see gel2 lane 9, single guide: see gel 10 lane 7) (SEQ ID NO: 4). Sequencing the PCR products revealed active PAM sequence specificities for these endonucleases detailed in Table 2 below.

TABLE 2
PAM sequence specificities and related data for MG4 enzymes

| | | Native | | | | Synthetic | Synthetic |
|---|---|---|---|---|---|---|---|
| | Enzyme | (dual guide) | | | | (single guide) | (single guide) |
| | protein | PAM | PAM | tracrRNA | sgRNA | PAM | PAM |
| Enzyme | SEQ ID NO | determined | SEQ ID NO: | SEQ ID NO: | SEQ ID NO: | determined | SEQ ID NO: |
| MG4-2 | 4 | nGnCCC | 155 | 139 | 134 | nGnCCC | 150 |

### Example 12.—Characterization of MG6 Family Members

[0207] PAM Specificity, tracrRNA/sgRNA Validation

[0208] The targeted endonuclease activity of MG6 family members was confirmed using the myTXTL system as described in Example 6. In this assay, PCR amplification of cleaved target plasmids yields a product that migrates at approximately 170 bp in the gel, as shown in FIGS. 6-9 Amplification products were observed for MG6-3 (dual guide: see gel 1 lane 2, single guide: see gel 2 lane 13) (SEQ ID NO: 28). Sequencing the PCR products revealed active PAM sequences specificities for these endonucleases detailed in Table 3 below.

TABLE 3
PAM sequence specificities and related data for MG6 enzymes

| | | Native | | | | Synthetic | Synthetic |
|---|---|---|---|---|---|---|---|
| | Enzyme | (dual guide) | | | | (single guide) | (single guide) |
| | protein | PAM | PAM | tracrRNA | sgRNA | PAM | PAM |
| Enzyme | SEQ ID NO | determined | SEQ ID NO: | SEQ ID NO: | SEQ ID NO: | determined | SEQ ID NO: |
| MG6-3 | 28 | nRRTAA | 156 | 144 | 135 | nRRTA | 151 |

[0209] Targeted Endonuclease Activity in Bacterial Cells

[0210] In vivo activity of the MG6-3 endonuclease system (protein SEQ ID NO: 28; sgRNA SEQ ID NO:135) was tested with the PAM sequence GAATAAGG as in Example 9 using a 22-nucleotide targeting sequence. Transformed E. coli were plated in serial dilution, and the results (showing E. coli serial dilutions in the top panel and quantitated growth in the bottom panel, where the right bar indicates non-targeting and the left bar indicates targeting sgRNA) are presented in FIG. 10. A substantial reduction in the growth of E. coli expressing on target sgRNA compared to E. coli expressing non-target sgRNA indicates that genomic DNA was specifically cleaved by the MG6-3 endonuclease system.

### Example 13.—Characterization of MG7 Family Members

[0211] PAM Specificity, tracrRNA/sgRNA Validation

[0212] The targeted endonuclease activity of MG7 family endonuclease systems was confirmed using the myTXTL system as described in Example 6. In this assay, PCR amplification of cleaved target plasmids yields a product that migrates at approximately 170 bp in the gel, as shown in FIGS. 6-9. Amplification products were observed for MG7-1 (dual guide: see gel 5 lane 10; single guide: see gel 3 lane 7) (SEQ ID NO: 40). Sequencing the PCR products revealed active PAM sequences specificities for these endonucleases detailed in Table 4 below:

TABLE 4
PAM sequence specificities and related data for MG7 enzymes

| | | Native | | | | Synthetic | Synthetic |
|---|---|---|---|---|---|---|---|
| | Enzyme | (dual guide) | | | | (single guide) | (single guide) |
| | protein | PAM | PAM | tracrRNA | sgRNA | PAM | PAM |
| Enzyme | SEQ ID NO | determined | SEQ ID NO: | SEQ ID NO: | SEQ ID NO: | determined | SEQ ID NO: |
| MG7-1 | 40 | nRRnC | 153 | 147 | 136 | nRRnC | 152 |

[0213] Targeted Endonuclease Activity In Vitro

[0214] In vitro activity of the MG7-1 endonuclease system (protein SEQ ID NO: 40; sgRNA SEQ ID NO:136) was tested with the PAM sequence TAGTCGGG using the method of Example 8 with a 22-nucleotide targeting sequence. The single guide sequence reported above (SEQ ID NO: 136) was used. The results are shown in FIG. 11, which depicts a gel demonstrating DNA cleavage by MG7-1 in combination with targeting or non-targeting corresponding sgRNAs or the S. pyogenes sgRNA. The data demonstrated that 22 nucleotide targeting sequences were functional with the MG7-1/sgRNA system.

[0215] Targeted Endonuclease Activity in Bacterial Cells

[0216] In vivo activity of the MG7-1 endonuclease system (protein SEQ ID NO: 40) was tested with the PAM sequence TAGTCGGG as in Example 9 using a 22-nucleotide targeting sequence. Transformed E. coli were plated in serial dilution, and the results (showing E. coli serial dilutions in the top panel and quantitated growth in the bottom panel, where the right bar indicates non-targeting sgRNA and the left bar indicates targeting sgRNA) are presented in FIG. 12. A substantial reduction in the growth of E. coli expressing on target sgRNA compared to E. coli expressing non-target sgRNA indicates that genomic DNA was specifically cleaved by the MG7-1 endonuclease system in E. coli cells.

[0217] Targeted Endonuclease Activity in Mammalian Cells

[0218] The method of Example 10 was used to demonstrate targeting and cleavage activity in mammalian cells. Open reading frames encoding the MG7-1 (protein SEQ ID NO: 40) sequence was cloned into mammalian expression vectors. Three vectors were tested, one with a C-terminal SV40 NLS and a 2A-GFP tag (E. coli MG105-BB), one with no GFP tag and 2 NLS sequences, one on the N-terminus and one on the C-terminus (E. coli pMG5-BB), and one with codons optimized for human expression cloned into the 2-NLS plasmid backbone (MG7-lhs). The results of this experiment are shown in FIG. 13. The endonuclease expression vectors were cotransfected into HEK293T cells with a second vector for expressing the corresponding sgRNA comprising a guide sequence selected from Table 7. 72 hr after co-transfection, the DNA was extracted and used for the preparation of an NGS-library. Cleavage activity was detected by the appearance of internal deletions (NHEJ remnants) in the vicinity of the target site. Results are presented in FIG. 15.

TABLE 7
MG7-1 mammalian targeting sequences

| | | Targeting | |
|---|---|---|---|
| MG7-1 | MG7-1 | sequence | |
| Target | Targeting | SEQ ID | Targeted |
| ID | Sequence | NO: | Gene |
| 1 | tgcaaagtaacttagagtgact | 160 | Albumin |
| 2 | cgcaaaagaaaattacagtcac | 161 | Albumin |
| 3 | aattacagtcactaaacaattc | 162 | Albumin |
| 4 | tttattaataagataaccttgt | 163 | Albumin |
| 5 | cgcaaaagaaaattacagtcac | 164 | Albumin |
| 6 | tcagaaatagggggtccaggag | 165 | VEGFA |
| 7 | ctttagccagagccggggtgtg | 166 | VEGFA |
| 8 | acggcagtcactagggggcgct | 167 | VEGFA |
| 9 | aaactccccccaccccctttcc | 168 | VEGFA |
| 10 | tttccaaagcccattccctctt | 169 | VEGFA |

### Example 14.—Characterization of MG16 Family Members

[0219] PAM Specificity, tracrRNA/sgRNA Validation

[0220] The targeted endonuclease activity of MG16 family endonuclease systems was confirmed using the myTXTL system as described in Example 6. In this assay, PCR amplification of cleaved target plasmids yields a product that migrates at approximately 170 bp in the gel, as shown in FIGS. 6-9. Amplification products were observed for MG16-1 (dual guide: see gel 2 lane 4; single guide: see gel 3 lane 10) (SEQ ID NO: 43). Sequencing the PCR products revealed active PAM sequence specificities for these endonucleases detailed in Table 8 below.

TABLE 8
PAM sequence specificities and related data for MG16 enzymes

| | | Native | | | | Synthetic | Synthetic |
|---|---|---|---|---|---|---|---|
| | Enzyme | (dual guide) | | | | (single guide) | (single guide) |
| | protein | PAM | PAM | tracrRNA | sgRNA | PAM | PAM |
| Enzyme | SEQ ID NO | determined | SEQ ID NO: | SEQ ID NO: | SEQ ID NO: | determined | SEQ ID NO: |
| MG16-1 | 43 | nRRnCC | 158 | 148 | 137 | nRRnCC | 153 |

[0221] Targeted Endonuclease Activity in Bacterial Cells

[0222] In vivo activity of the MG16-1 endonuclease system (protein SEQ ID NO: 43; sgRNA SEQ ID NO: 137) was tested with the PAM sequence TGGACCTG as in Example 9 using 22 nucleotide targeting sequence. Transformed E. coli were plated in serial dilution, and the results (showing E. coli serial dilutions in the top panel and quantitated growth in the bottom panel, where the right bar indicates non-targeting sgRNA and the left bar indicates targeting sgRNA) are presented in FIG. 14. A substantial reduction in the growth of E. coli expressing on target sgRNA compared to E. coli expressing non-target sgRNA indicates that genomic DNA was specifically cleaved in E. coli cells by the MG 16-1 endonuclease system.

### Example 15.—Characterization of MG2 Family Members

[0223] PAM Specificity, tracrRNA/sgRNA Validation

[0224] The targeted endonuclease activity of MG2 family members was confirmed using the myTXTL system as described in Example 6. In this assay, PCR amplification of cleaved target plasmids yields a product that migrates at approximately 170 bp in the gel, as shown in FIGS. 6-9. In the assay shown in FIGS. 6-9, active proteins that successfully cleave the library result in a band around 170 bp in the gel. Amplification products were observed for MG2-4 (dual guide: see gel 1 lane 7, single guide: gel 8 lane 8 and gel 8 lane 9) (SEQ ID NO: 2). Sequencing the PCR products revealed active PAM sequences specificities for these endonucleases detailed in Table 9 below.

TABLE 9
PAM sequence specificities and related data for MG2 enzymes

| | | Native | | | | Synthetic | Synthetic |
|---|---|---|---|---|---|---|---|
| | Enzyme | (dual guide) | | | | (single guide) | (single guide) |
| | protein | PAM | PAM | tracrRNA | sgRNA | PAM | PAM |
| Enzyme | SEQ ID NO | determined | SEQ ID NO: | SEQ ID NO: | SEQ ID NO: | determined | SEQ ID NO: |
| MG2-4 | 2 | nAGG | 154 | 138 | 133 | nAGG | 149 |

[0225] While preferred embodiments of the present invention have been shown and described herein, it will be obvious to those skilled in the art that such embodiments are provided by way of example only. It is not intended that the invention be limited by the specific examples provided within the specification. While the invention has been described with reference to the aforementioned specification, the descriptions and illustrations of the embodiments herein are not meant to be construed in a limiting sense. Numerous variations, changes, and substitutions will now occur to those skilled in the art without departing from the invention. Furthermore, it shall be understood that all aspects of the invention are not limited to the specific depictions, configurations or relative proportions set forth herein which depend upon a variety of conditions and variables. It should be understood that various alternatives to the embodiments of the invention described herein may be employed in practicing the invention. It is therefore contemplated that the invention shall also cover any such alternatives, modifications, variations or equivalents. It is intended that the following claims define the scope of the invention and that methods and structures within the scope of these claims and their equivalents be covered thereby.

The application's sequence listing, which the Patent Office published only in electronic form, follows.

SEQUENCE LISTING (280 sequences)

SEQ ID NO: 1 - protein, 1152 aa, Unknown
  Description of Unknown: uncultivated organism
  MG1-280 effector
MKDCLDKVLAITLGKTFIGLCLRDDREIYKLESLLIPAEFSSLSDLQHRKNAARCREAHKRRENWFMNEIWLKAGLPDFRQDKNWENLKDKLPTYYKNDKNLKTREFPAYPDKTSFNSALLRIHLIEGKPLASWQIWKALWAAIQQRGFYFYNWKTEPAGIESIKGNVAALEEQRTQLETDIEKLKALKKSAHGIASEEYAELLRLKQSELKAWKEEFAELTHQIKHYEELLLDNLHQEKYTYPCYLEAAKQGLWSFDTLTNKAVIKNQLDHTAEALKPGENHVPRAFRIKELKKLWAQAQVQLPELKGYDVEYFLYGETRLPFASAWNNEYKAFRGKAHYDCQGVMGQKVPRFDNRFISSCKLFPGRNACKASDPLSLQFDLLTQLKRLKYFSRDSKAVYSLSPTELKTVFEELWTGKIKEQINNNSPQLFIPYTFLQKALRKHVASFDELQNMEQLEKLKLKRSGRSHFSRLALSLMKQVLLSAPSSSCAPTDYINPSDYAQHDKPKGLTEVEVENALRRLGETWKTFDIPEYSHEMSGQLTREAAIEKLLAESNNPIVRHRLTLVHNLLNQLENGFNLKKHPPKQVFLECIGAEGGGFEGNKTRKARPKKSLSQDVINDNLKEKLKELNVEPSKTNVLKLRLLQEQQSQCPFTGEKLDEAQLQHYQIEPIVRVTEQSFTQTLGNKVLTTPDTCREKKQRTPYHWLAQALVWPEYVARVQRMYSGVQEEKKRLLTAPDAQELALKSKNGYIARVLRQLIALHFGYQEMANSEIRHIFVSDGTITKAIRKQYELNNWLLTNQEAQELNGLLNQLSDTSKQQSLEEKNIILRSVKKLNKKQLNNGKRHALNAFCLSFTSHLQKKIIQDAEPENLKISTLDNLKPQARSILNELFPKPLRRNNKELYPEATIYRYNPKHNAITIRKNLRSFLENDKDGKAIEKIADQSLRHYLKQMRQKLPNREAWENFLDPDRTANRDSKGNLLEDPYLLECRHPLFNTLVKKVEVITSELDENPTISHDGLRVAGEYKDFGSKSTKGQFKRTKQHRGQLLYQDTKGKWRVFPVYGHMKLAEARKQAKEKGPLYQDGLLFYSSALISIEKAFALSNGNLLKAGVYKLRTIKSEGIAVIESHEGTEYLVSINKITEAGLSLIR

SEQ ID NO: 2 - protein, 1201 aa, Unknown
  Description of Unknown: uncultivated organism
  MG2-4 effector
MNSTRSTPLVLSFDIGYASIGWSVAEVVDPANNLQAGVVTFPSDDVLNSERAGHRRARRNIAARRNRVQRLKLASVGAGFVTAEEIETLDRMERKSAPEWRHCPWFLAARVLGESPESTLTGLQLFHVLRWYAHNRGYAPPSWGLFDEADGEQEEDFEKVRNAEKAMHEFGADTMAQTWCALLDADPTAGRWPEPRHWAKGENMAFPRERVQAEVTRLLVAHVGKLPGVTSDFVRCLIDDWEHHPKIRSWLQGADPRTGKLRDYALPKRYEGGLLFGQHIPRFDNKIIPWCPFTLKEDTNSGKISGRNVPKKHSRAFLDFKVAMRLNDLALSELGESGGRLSAGQRMTLFKRIEGYGDVTVRQFADLVAEVCAIPKPDLTTRIPEREGSDRPFELRPERKALIAILTGGRSLPSWPLIHSIWDCFEDAEAVLRPVFHGKPTSWADLIEQAKAPDVLLERLEELFRLGKGKPSRSKKAQPPPDFEVLLRCKITITKAHGRARYCSDKLRAATDEALGGLDPRRAPTTETSDDAGCLYLNERQRDLQDRLPLSKLTNNHLVRHRLLIFRRLLQDLVNTYANGDRERIDAIVVEVARDLNEYSGKNTKQRVALFQEKQRPFNDAAEAFAQALIDDAQYTPEQAQALATYANVRRFRLMREQNFECPFTGRHLSAEDIAKDRVDFEHIIPRSLKPTDSLDAMVITYRAVNQAKRNRTAMRFIKDMAGERLDADDAGWSYHTPQQFETAVNRMRPKGRLNTAAKRSQANRCDALLVEDYEPREADFLQRDLTQTGYLMKYAVGEARKFFRSAPRQPRFIHLEGRVTTFFKKAWRLTETLAPISPLFLREYADPRTGRWQSTVRPKAELRRFTQLHHALDALTLGLATALVPGIERKELRRALSLRQAKGDDATLLRSDPKLGEALRWRTEDRFEAAPLSGKLESAVRRALAEGRVVQHVPAKRQGMKVDSNFFGFVEFDETGRLRVRQKMRSPTTRRREIKTTVKNGKNLHTLSHLSLDPKSWLGAPDHPLRRKQLEHGLRTENDLANPKLGNIRGMLPIRENWGIALITKDGSPRLDVIPYINVHQWLEVLALENGGGSPVVLRKGHLVGFDAEKCPEEYCGAWMLLGVKDGRSGTTLELIRPWMVAPRKGGTKESSAKQAIKPASGYSEKEGKASGVFLQRSADVFLKLGLRPLDHDLTGIAAF

SEQ ID NO: 3 - protein, 1080 aa, Unknown
  Description of Unknown: uncultivated organism with predicted taxonomy: Verrucomicrobia
  MG2-90 effector
MKTARAISASSNLSSTATPIAFAFDVGHSSIGWSVLTAPDAGRPDILGCGVVLFEKDSALAIQRRQHRQQRRHVRATRHRIARIEKLLVYLGALDATVLTAKHAAGAGHATPWLLAARVLASEGKQPLNWSELWDVLRWYAHNRGYESISADDDEEENKEKRQHAKEGMEHFGKDTMAETICAWLGQDPLAPRINTTVSYKEKNAAFDRVVIRDEVRRILKFHVGKLKGIDADFIRALLDDARAKSCSEIRLPRRYKGGLLFGRLATRYHNRIIGRCPFSGGKLPLKDCSEFYRFRWAMLLANIEIATPTDSTLRPLTVEERKNLTRLTEADGYFTPAEFRKTVRTLTNSARDNLDQMFMDATAAENLVLDPAFRLARSDKWIAPLWSHLPENVRRHALNRWRRGRAQTLGALRSEAVKNECDLAAFDAALTALCTTPTKRSRKKEAEPPPTSQQILEALFPAPLIGGRAPYARLLLIQAYNEAMAGRHPRAEGGCLFETPESRRARETRSLDQQTNNHLIRHRLQILGRLVAQLVADPNYAGGDADRVTRIVLEVNRDLREMAGLTAQDIAKEMNERLRSHAQVSKRLIAELPPGTRINASLIRKARIADDLDWKCPYTGKEFDPIDLITKNVDLDHVIPRSQRPSDSLDSLVVTFPEINKWKSNRTAWQFVHDEETKPVPKLPHLSIKQLKRYEGDVASFDKRGHLDDQHRKKRRIEKLLLKRYEEKAGGFTPGQLTQTSQLSRLGQQVLRAPFVHLTKQPTFIALPGQVTARVRAAWDVLGCLAEAAPAVLEADGKAKNKTEIREITHLHHALDACVLGLAAARIPNRGDIWRLLLERRLDAGQRTQLEVLDLGGFDANGGFRLRDLPDELKQQLRQRLAERRVVQHVPVDMSGIRVQENTRGIVKRENGRVFLRQRKKNADGKIMVNETDELENKVIGLPTSTKKNGKLAALNGVRVIADNYGVAILCDEKLPPEERLVIIPHAKVWHRLQDLKQLNGGKLPSIWRNGQIIELTKGKRAGRWRIFSIKNNTSGMALDLGSVEAVKATWINCLLKSLLRDGAQRLSTTLIGARQLSA

SEQ ID NO: 4 - protein, 1043 aa, Unknown
  Description of Unknown: uncultivated organism
  MG4-2 effector
MLREPGNSVKSKIMGQQAKRRSYVLGLDIGTHSVGWALLKFRDGRPCGVERAGVRIFEPGVEEVAFERGRAEPPGQKRRQARALRRQTERRARRKAKLLHILQRAGLLPKGEADEILPALDRDILARHSAAWPGARDALPYWLRSGALDHRLEPHEFGRALYHLGQRRGFLSNRRAPMRKNEEDGKVKAGISTLKEQMEKAGARTLGEFFAGLDPHQERIRQRYTSREMYEQEFEAVWSAQAAHHPAILTDDLKARVHHAVFHQRPLHNQSYLAGSCTLEPDRKRTPWACLIAQRFRMLQKLNDTRVLPASGPERPLSDEERQTVLTELDRKKELKFDRVRKLLGLSADSSFNWESGGEDRLVGNTTNARLAKVFGKRWWSLSPDDRDQVVEDVRSYEKAEALARRGREHWGLDEKAAGELSKLSLEDGYCRLSRQAIERLLPGMEKGTAYMELVRKLYPDRWAAGKPVDLLPALAETDLDMRNPVVRRCLTELRKVVNAVVRHYGKPSAIRIELARDLRKSAKQREQTWRRNRRNQQDREAAAEKLLQEARIANPSRADVEKVLLAEECGWHCPYTGHGFGMADLFGPHPHFDVEHIVPFSRSLDNSFLNKTICEARENRDRKRNHTPYEAYGADAERWDQIIARVQSFRGTASREKLRRFQQHEVEDLDGVAQRELNDTRYASLLAVQYVGMLYGGAVDAGHVRRVQAAKGGTTGYLRDMYGLGFVLGEGRKERSDHRHHAVDAVAIALTDPAALKSISQAASDERRGGRVSFGAVALPWVDFIGDVQAAIEAINVSHRPSRKVNGALHEETFYGPRGMDGDGRPTGYVQRKPVERLSAKEIPNIPDPAVREAVQAKLDEVGGTPAQAFKDPANHPVRKRGIPVHKVRLRLNINPVQVGSGATERHVLTGSNHHMEIIEVRDAKGGKKWTGRLVHRLEAKRRALGRETIVDRAVQAGRQFQFSLSPGDMIELTGEDGERKLHVVRSISEGRIEYVDARDARKKADIRASGDWRKPAVGSLLRLHCRKVVVTPFGEIRYAND

SEQ ID NO: 5 - protein, 1038 aa, Unknown
  Description of Unknown: uncultivated organism
  MG4-1 effector
MDKVKANSTTLGIDLGPNSIGWALFRNDKSNKPGGLIATGTRVFHAGLDDLEMDGRGKSRNSKRREARSRRRLLERRRRRMTNLAIFLRNIGLFPEIKIEDSGIRHEFLKEYDLANDQPYTLRAKGLDHKLEPYELGRALYHHGQRRGFLSNRKSAPKDTKEEKGIKKEIGELAGDIIKKKARTLGEYFSMTEPISEPIRGRYTSRKMYIDEFEQIWSKQSEFYPDILNEENRKKIFKIIFHQRPLKSQKHLIGECELEPNRFRAPWGILKAQRFRYLQLLCNLTVADDARSTQRPITDEEFELLQQNLELHGDITFAQARRLLGLGRFAKFNLELGGEKRIIGNKISAKLAKIFGEEIWSGFTEDKQNKIAEDLRCINNEDILKSRGINVWGLNEEGAEKLSQIKLEDGYCRFSRQAIDRLLPMLERRVSLQTAIRELYPERWDNEQDRLDFLPPVSESGLPALRNPIVERTLTELRKVVNSIIAQYGKPNMIRIELARDLKQSGQQREKASRKIRANQRAREKAAKKIIEETGIENPTREDILKVLLAEECNWICPYTRKNISIGSILGDNPQFDIEHIIPFDRSLDDSFLNKTLCDAVENRKVKKNRTPFEAYHGSARWDEIVVRLSDFKSDVKFQKLRRFKMTPEEVQKELEGFTARQLNDTRWASRWAKQYLGLLYSGIKGDGIDAEGKRKVQAVGGPVTAHLRNQWNLNSILSDSDIKGRDDHRHHAVDAVVVGLTDAGSIKKLSGAAVSGYSGRKKFKEIEPPWDGFLEEVRNKIQSVTTSHRLSRRVRGAMHQESFYGKPRKDKDGKTYIHIRKPLESLSKKELKYIVDPVISDAIKTKLKELKQDDPKKAFADIENHPVLSGNHGKKTPIHRVRVRMNLSETFPVGKNHRTRHVLSDSNHHIEIVESTDPENEKINWEGLVVSLFEAYQRKKNGTPIVRREFGVNKKFLFSLANGDIIELDNAEGTARGLFIVRTVRKSKQIKFVPINDARAYKQDMWGGLTAKPDSLRRRRCRKLTVTPLGDVRTAND

SEQ ID NO: 6 - protein, 1050 aa, Unknown
  Description of Unknown: uncultivated organism
  MG4-3 effector
MGDADGFVLGLDLGAASIGWAILRCGENGDPGAIVGAGSHCFDAGVEGSIEDAKDESRAKVRREKRMPRRQHWRRARRKRKVVHILQQVGLLPAGPTTPPEALHDLIVELDRELREKYLRPGDPREAHLLPYLLRKRALDEKLEPFALGRALHNLGERRGFLSNRKTQNTDEDPGVVKEGISDLAREIEAAGARTLGEYFASIDPTSTKLRRRWTARQMFIDEFNAIWDAQAPHHDAMTAELRDELYHALFDQRPLKPQTHLIGRCSLMPGRRRAPIALRVAQRFRILQAVNNLKITFPDGETRFLDEAERRKVFEALDTSAERTFGQLRQKKILGLPKGSTFNLEEGGEKRLVGNRTDAKLASIFGDRWNELSECDRDQVVEDLLTIEDTEAMERRASGRWGLDEEAARKLADLRLEDGHANHCRLALGALVTRMEQGVPYATARLEIFPESFEAKEALEALPPVKDFEKDLRNPAVCRALTELRRVVNAIIRRHGKPDCVHIELARDLKQPRKEREKRSKRNRANQKLRQDAVKRIVTELKGVPANGMAIEKVLLAEECGWVCPFTGRRICMNTLLGPTPQFDIEHILPLSRSLDNTFVNKTLCYHEENRAVKGNRTPFEAYSASDDRWAEILERVGHFKSDLAREKLRRFKMEEIPEGFTDRLLQDTRYTSRLAADYVAVLYGGRSDAGGRLRVQVSPGGVTYHLRRAWQTNAILGGPEKNRSDHRHHAIDAVMIALTTAGVVKQLGDAARKTTPRKYPFSSLPDPWPGFNDELKRVVDGIIVSFRPDRRIAGPLHAETIYSKPIRTRDGRKVTHVRKQLHKLTSTDIKNIVDPVIRGIVTRKLAELGGTPDKAFALAESHPTMTTGDGREVPIHRVRVRVNERPRRVGRGSGARLVTSKGGTNHHVVIVAELADKTDPNTGERLEDRWVDKVVSRLGAYRRLAACKRAGRPDQVVRRDWGGKRRFKFSLTGGEFVEMEDDGGERCLYRVYTISKGDMWFRLHSDARLKKDITAAGDHVRCSGEKLRRRKARKVRVTHLGDIVPAHD

SEQ ID NO: 7 - protein, 1091 aa, Unknown
  Description of Unknown: uncultivated organism
  MG4-4 effector
MTIDKRAASRDAAGGYILGLDLGVGSIGWAALFGDQLSDETLRMGVRVFKAGTDGDFEKGTDESRNVARRAARQTRKGYCRTRRRVVKLFNVLKKAGLLPEGETSTPKARQDFLNRLDRELFAAYCPSASRVEKQTFLYALRARALDEKLTLCAVGRSILHLAVRRGFLSNKKITGAKSDKENKEDGVVKNAISELNAEMAEGGARTVGEYFASLDPMKFGERRIRGRYLSRSQIQAEFDAIWASQARFHPETLTAELRAAVYRAIFRQRPLKSQKGRIGRCEFEKTARRVEKGDPAFQEYRIWQRVLDLRLYDSPEAPETARPLTPEEQDKIAAFLGENESATFNQLRKTLGIKGKPDKDDKKATLWRFNFEVDGESKLLGNRTRAKIVAVLKKHKAEKSDEEIDEIAREILLFENEEALARRLRKMFPEFDETTAEQLSEVSLETTRANVSRRAAEKLTAAMKKKRLPLQTVRQELYPNERNESVYDFLPPVFDELGDPRNPVVLRALTELRKVVNAAIRKWGKPALIRVELARDLKRGRKEREKIFKENVKRKKEREQIEKEIKSICKRDARPFEILKWRLWKECGGVCPYTGKSISERQLLGDESPVDVEHIIPLSRSLDDSFANKTLCWAEENREVKRNQTPFECYSAKPQWREILERVRRFKGDMRQEKLKRFLQEKIDEDPSKRMLNDTRYISRLATKYLGALYGAVDGVEPSATDEKGTRRIQVSTGGATAWLREEWGLNRILAKKGERPKKNRDDLRHHAVDALVVALVGPKETQTLSKAAQKASELGLKRNFLNSEIAPPSTATGEAFLDVVARAVDRIVVSHRVDRKLSGSLHDETNYGAEENAGRRAIRKPLTEFNTAAKIDAIVDPTIRRLVREKWVENGGDAKKFEANPPFMTARDGRQIPIKKARYWKKNTTKGIGRFKLEKQLGRPLSEKEQKAHKRLRYVETANNSHMEVYAVLDENGVEKEWRSKVVSTFDAYERKRRKKPVVQRDFGPDARFLFSLALNEIVALQDGELLVVSGISQGVELECKRINDARSATRRKAEKTRVRFTSATGNFMPVGFRKMRIDVLGNVFPANE

SEQ ID NO: 8 - protein, 958 aa, Unknown
  Description of Unknown: uncultivated organism
  MG4-1 effector
MTNLAIFLRNIGLFPEIKIEDSGIRHEFLKEYDLANDQPYTLRAKGLDHKLEPYELGRALYHHGQRRGFLSNRKSAPKDTKEEKGIKKEIGELAGDIIKKKARTLGEYFSMTEPISEPIRGRYTSRKMYIDEFEQIWSKQSEFYPDILNEENRKKIFKIIFHQRPLKSQKHLIGECELEPNRFRAPWGILKAQRFRYLQLLCNLTVADDARSTQRPITDEEFELLQQNLELHGDITFAQARRLLGLGRFAKFNLELGGEKRIIGNKISAKLAKIFGEEIWSGFTEDKQNKIAEDLRCINNEDILKSRGINVWGLNEEGAEKLSQIKLEDGYCRFSRQAIDRLLPMLERRVSLQTAIRELYPERWDNEQDRLDFLPPVSESGLPALRNPIVERTLTELRKVVNSIIAQYGKPNMIRIELARDLKQSGQQREKASRKIRANQRAREKAAKKIIEETGIENPTREDILKVLLAEECNWICPYTRKNISIGSILGDNPQFDIEHIIPFDRSLDDSFLNKTLCDAVENRKVKKNRTPFEAYHGSARWDEIVVRLSDFKSDVKFQKLRRFKMTPEEVQKELEGFTARQLNDTRWASRWAKQYLGLLYSGIKGDGIDAEGKRKVQAVGGPVTAHLRNQWNLNSILSDSDIKGRDDHRHHAVDAVVVGLTDAGSIKKLSGAAVSGYSGRKKFKEIEPPWDGFLEEVRNKIQSVTTSHRLSRRVRGAMHQESFYGKPRKDKDGKTYIHIRKPLESLSKKELKYIVDPVISDAIKTKLKELKQDDPKKAFADIENHPVLSGNHGKKTPIHRVRVRMNLSETFPVGKNHRTRHVLSDSNHHIEIVESTDPENEKINWEGLVVSLFEAYQRKKNGTPIVRREFGVNKKFLFSLANGDIIELDNAEGTARGLFIVRTVRKSKQIKFVPINDARAYKQDMWGGLTAKPDSLRRRRCRKLTVTPLGDVRTAND

SEQ ID NO: 9 - protein, 1030 aa, Unknown
  Description of Unknown: uncultivated organism
  MG4-219 effector
VTRNLGIDLGPNSIGWALVNAGDNGSPCLITTGVRVFESGLADLETDAKGVSRNLQRRQARAVRRLTERRVRRLRKIASTLQTGGLLPEGSLNDGLDRHLFFNRFDTSHDSPYQLRAQALDQHIELFELGRILYHIGQRRGFLSNRKSQPRKNEKPGVVKSKIEGLEKAIAEAGARTLGEYFSGLDPEQERIRERYTSRAMYEEEFKLIWNKQSEFYPGVLTEAFREKVYKAIFYQRPLKNQKNLIGQCELEPQRKRAPWDLLISQRFRYLQKINNLRIEDTIRRQFRELTTDERTVIVDNLETGGDLTFAGMRKLIGVSRNTHFNLELGGEKKVPGNRTAAKLISIFGLEKWQSFTESEKEQIVEDVRCFVKEEALKKRGMKAWGLNEEAAAKLSQISLEDKHIGFSRQAMTRLMPYLERGVPLQTAIKECYPDRWNRDGQPREFLPPVRSEELTELRNPIVERALTELRRVVNTVIMKYGKPDVVRIELGRELRQSPKQRESTWKSMRSREKERKAAAERIANEMGIENPTRTDILKVLLAEECNWRCPYTDKPISMASLLGDHPQFDIEHIVPFERCLDDSFLNKTLCDAEENRKVKKNRTPYEAYHGSPRWEAILKNVGAFNGTASYEKERRFQFTSDDVQEFISGFTSRQLNDTRWASKWAKQYIGLLYGNVNADGIDAENRRRVQATTGPVTAFLRSVWGLNGILSDGPAKSRDDHRHHAIDALVIALADSAIVKQLNDAASRAGVAHQRLFFFMDLPWDGFVRDVESAVGNLVVSHRVSRRVRGALHEETFYSEPRLDEKGKSFVHIRKPLSALDENNIDEIVDPAVREAVKTKLAEFNDKPKKVFAVPENLPTLARPDGRRVPIRRARIRRDLSAVFSIGEGHRRRYVMTDRNHHIEYVEVSVKEGVVRWEAEVVSMLEAYRRLKSGEPVVKRDHGSDKRFLFSLAGGEIIELGPIEGNGRGLYVVRTVPQSKQLFFVPINDARKLKEIPKAGHTAVPDALRLRKCRKVTVTPLGEVRFAND

SEQ ID NO: 10 - protein, 1044 aa, Unknown
  Description of Unknown: uncultivated organism
  MG4-220 effector
VAEQEQPCYTLGLDLGTTSIGWAVVETEPEQYKPRSLVAAGVRLFDAGVEGDIAGGRDESRATKRRQARLQRRNTWRRKRRQWKVFRLLQEAQLLPPLDTTDPEKRHQYFLDLDKQVRDEFVKPKKRVDNHVFLYQLRALALDGPLPPHAVGRALYHLAQRRGFLSNRKGEDRDDEDRGNVKKGIADLEAEMAGAGSRTLGEHLSRIDPEEQRIRQRWTRRSMYQEEFEKIWVAQAPHHASMTEDARRALCQALFYQRPLKSQRGLIGHCDLEPDERRCRIALRTAQRFRLIQGVNHLRIRPPGNEPEEKLTQEQRVLLIETLTREGDLKFSRVRKLFGLPQTWKFNLEDGGEKRLIGNRTESKLAAIFGDRWCELDDADKDAVVEDLLSYEKQPALASRGRRRWGLDSEQATAFSLMALEQGHMRHSVRAIERLLVPMADGVPYATARQDAYPESYQAQEQVDQLPPLGLALPELRNPTVSRVLGELRKVVNGLARRYGKPARIRIELGRDLKTPRTLRERRAKENRARQAVRGAAKQRLLEEAGIRQPSRADIEKVLLADECGWTCPYTGKGFDMARLVGPTATFDVEHILPFSRSLDDSYLNKTICDVHENRHVKGNRTPFEAYSGNVERWHEIIDRVRHFNGDAARIKLHRLQMEEIPAEFASRDLNDTRFASRLAMDYLGLLYGGRVDEKHVRRLQASSGRVTAHLRRAWQMNAILGMNGHKSRGDHRHHAVDAIAVALAGPRTIELLAHAAQQAWEVGGRLYAPVTEPWRGFLNDARRVIADIAVSRRVNRRLRGPLHEETLYSKRKDGRDRDGRGVAFRHVRKPLAKMSPAEVSAIVDDQVRELVRERLDIVGDTPKKVFADEENLPHLRTKDGRVVPIRKARIRLHKSVASIGSMGSERHVAPGTNHHMAIVASLDERGNEVRWEGHVVSLLEATQRYSRGEPVVQRDWGVNRYFKFSLTAGEFLSQEHEGKEQLVRVVSVSENDIESVLHTDARPITERKKIKGARIRGGPDKLRQRQACKVSITPLGDVVPAND

SEQ ID NO: 11 - protein, 1038 aa, Unknown
  Description of Unknown: uncultivated organism
  MG4-221 effector
MDKVKANSTTLGIDLGPNSIGWALFRNDKSNKPGGLIATGTRVFHAGLDDLEMDGRGKSRNSKRREARSRRRLLERRRRRMTNLAIFLRNIGLFPEIKIEDSGIRHEFLKEYDLANDQPYTLRAKGLDHKLEPYELGRALYHHGQRRGFLSNRKSAPKDTKEEKGIKKEIGELAGDIIKKKARTLGEYFSMTEPISEPIRGRYTSRKMYIDEFEQIWSKQSEFYPDILNEENRKKIFKIIFHQRPLKSQKHLIGECELEPNRFRAPWGILKAQRFRYLQLLCNLTVADDARSTQRPITDEEFELLQQNLELHGDITFAQARRLLGLGRFAKFNLELGGEKRIIGNKISAKLAKIFGEEIWSGFTEDKQNKIAEDLRCINNEDILKSRGINVWGLNEEGAEKLSQIKLEDGYCRFSRQAIDRLLPMLERRVSLQTAIRELYPERWDNEQDRLDFLPPVSESGLPALRNPIVERTLTELRKVVNSIIAQYGKPNMIRIELARDLKQSGQQREKASRKIRANQRAREKAAKKIIEETGIENPTREDILKVLLAEECNWICPYTRKNISIGSILGDNPQFDIEHIIPFDRSLDDSFLNKTLCDAVENRKVKKNRTPYEAYHGSARWDEIVVRLSDFKSDVKFQKLRRFKMTPEEVQKELEGFTARQLNDTRWASRWAKQYLGLLYSGIKGDGIDAEGKRKVQAVGGPVTAHLRNQWNLNSILSDSDIKGRDDHRHHAVDAVVVGLTDAGSIKKLSGAAVSGYSGRKKFKEIEPPWDGFLEEVRNKIQSVTTSHRLSRRVRGAMHQESFYGKPRKDKDGKTYIHIRKPLESLSKKELKYIVDPVISDAIKTKLKELKQDDPKKAFADIENHPVLSGNHGKKTPIHRVRVRMNLSETFPVGKNHRTRHVLSDSNHHIEIVESTDPENEKINWEGLVVSLFEAYQRKKNGTPIVRREFGVNKKFLFSLANGDIIELDNAEGTARGLFIVRTVPKSKQIKFVPINDARAYKQDMWGGLTAKPDSLRRRRCRKLTVTPLGDVRTAND

SEQ ID NO: 12 - protein, 960 aa, Unknown
  Description of Unknown: uncultivated organism
  MG4-222 effector
MPDQLSHEYVLGIDLGTNSLGWAIIGLIDGEPAQILSAGSRVFEAGMEGDLSSGREDSRNLKRREARSHRRLLWRRRRRLTKLFNLLFRSGWLPPAPDASSAASRDHHPPLAPDQLQDYFNNLDQEILSSAWFKSKAGSGIFPQPEHTLPYILRASALDEPLEPHFLGRALYHLAQRRGFLSNRKQAAKKKDDEGAVKEGIAELRKAMQEADARTLGEYLSHLDPSVERIRSRWTARDMYENEFNAIWDAQAAHRPDLLTPARKKQIHDAIFYQRPLRFDPNTIGRCELEPGKQRAPAWLLTSQRFRLLQTVNNLRVLPPDDVEMPLTPADREKLIEELEVKGDRTFKQISKLLNLEKGYTFNLERGGEKRIKGNRTSADFFNVFGQRWLEMPSEERNRAVEYVHSFQKPAKLKDAARKKWGLSEEQAEKLAGITLEADYMNLSRKAMERFLPLLEQGMTYGEARRQLYPEAFRPARACDLLPPVEHALTQIRNPAVMRSLTELRKVVNAAVRRFGKPTFVHLELARDLKKSKKQRQAISENNRRNEKARIEAAKKIIAEAGIAGPRPDDIRRFLLAEECRWMCPYTGKSISVSSLFGPEPQFDIEHIIPFSQSMDNSFPNLTLCHVPENRAVKGNKAPWQAYHGDPERYEAILDRVRRFTGDRRTVAAKLKRFAMDDDGLEGFLEDFRNRQLNDTAYASSIAAKYLGSLYGGVNDAEGRKRIQATSGRATSYFRSLWKLNSILNDGPTTGGGAILKSRGDHRHHAVDAVVIGLTDAAMIKRLSDAAQRAPLEHRRRFASLEAPWPNFVDSVRAEIDKIVVSHRVSKKVSGALHEETIYSRPMGEKGEVRVRKPLASLTKPEVEKIADDGVRKLVRQKLEELGGIEPKKAFSNPENLPRFPSSGVVIRKVRISKALPTSELGKGRATRHVTSESNHHVEIYAEIDEQGKEGKWDGEVVSM

SEQ ID NO: 13 - protein, 798 aa, Unknown
  Description of Unknown: uncultivated organism
  MG4-223 effector
LAGQDQSERVLGLDVGTNSVGWAVIEWAQGKPHRIVGMGSRVFPAGMDGSIEQGKEESRNRKRRNERLARRSRWRRKRRRDRIYRLLAGGGLLPEADIEDPKSVHEAIQSLDLALLAKFVDPTDHRRNQLLPYVLRKAALSERLELYEVGRALYHLGQRRGFLSNRKSPMRDQDELGLVRQAIANLESEMNSVGAPTLGAFLADADPERGRIRTQRTHRSMFEKEFDCIWAAQSKHHACMTEELADQLRKTMFFQRPLRSQKSLVGKCELEPGQRRASMALLDYQRFRLLQGVNHLEWCQNDGTRRTLEHTEREQLIAALQEQGDLTFAKIRRLLKLSGRSGHFNLEEGGEKRLCGNRTNSKLRALFEDRWDQLSVEEQNRVVHDLMSLQNDAALARRAEHVWALPSDFAKQFATLALEEGSASHSLRAIRKLLPLLEEGHSYAHARLLTYPGVHQNTEPVDRLPPVIEALPELRNPAVIRSLTEMRKVVNSVIARFGKPHRIRVEMARDVKQPKRRRQERWKKMRRREEQRAAAKRRIFDECGITNPSRSDIEKILLADECSWICPYTGRAFGMADLFGPQPSIDIEHILPFSRTLDNSLVNKTLCDVHENRLRKQNRTPFEAYGAMAERYDEILGRVARFQIDADVRRAKLERFRRRELGGEVLDAFSERQLSDTRYTSRLAADYAALLFGGRVDSEGRRRVDVSAGQATAILRRAWGLGGLLGGGGGKNRTDHRHHALDAVVVALTGPTEVKEIAKAAKRSARDQSHLTGVNYFCRWTTTIFAGVGFSLLPLRFS

SEQ ID NO: 14 - protein, 1065 aa, Unknown
  Description of Unknown: uncultivated organism
  MG4-224 effector
MPSQHSQPYILGIDLGSASLGWAAVAVDGEKLPSALLATGVRVFDPGVAGTEMDIQKGKDESKSVKRRQMRLQRRQLRRRAARQCELFERLQGAGLLPSYSQPAPRTSSQKSLARHEILKVLDLELMARCKPRMAAIPAPDHVLPYYLRALALREQLEPYELGRALYHLGQRRGFRSNRREISKSKQEEQEKSKVYSGIAEIAAAMREKGVPTLGAFFASADPVNHRRIRGRWTARDMFESEFDAIWAAQAPHHPGLLTNDLRNKVRHLLFFQRPIAAQSHLIGRCELESGRKRAPLACLDAQRFRLLQKVNDLRIRSADCSERPLTGEERRKLAEALQTRGDLKFNEVRKLLGLPQRGNWFNLERGGEKKLPGNRTASKMLSAFGERWNHFTSQQRDQIVEDWHTAETEDWLIRRGMNRWGLDEKQAKLWAETNSEDGHSRLSRKALSKLLPLMETGLSFKEAEKQIYGTHFSGGTIHDLLPPVREEIPELRNPAVERALTELRKLVNAVVREFGKPSEIHVELARDLKRSREDRKELWKTFRRRQDNREKLRAEIERQTDLKNPSRSDIERVLLGEECGWICPYTGRSIRFASLFGDHPQFDIEHILPFSRCPDDSFANKTLCFQEENKMKSNRTPWEAYGPNPQRWEEILERVRRFQNPGKLKRFQVRSSEELAEFTSRQLNDTRYASKLAARYLGLPYGGRDSVEQDGTSRRKIYASPGGLTAILRRNWGLESILREPDAGANNQKPGKPRTDHRHHAIDAITIALSTPAAVKSLSDAAESNALRGRTSFKGTQAPWPHFVDSVRPHIESLLVSHRPERKLSGPLHDETLYGRPYEENGKTYVHVRKAIDGLTKNEVEHIVDPAVRAAVIRRLQQAGGDLKKVQAAGAEPPYLETEDAHRIPIYRVRIRKVLTPSAVGEGPRKRFVEPNNNHHTEIVAVLDNREDEIRWEGVPVTLLEALQRKRNDLPIVQRDHGTGYRFKFSLMKNDTIEINKNGNTERYLVRSVWSNGQLTLLRMNDARKQTEIKAAKEMWFPNAETIRKLNCRKIMVDLLGRVHPAND

SEQ ID NO: 15 - protein, 958 aa, Unknown
  Description of Unknown: uncultivated organism
  MG4-225 effector
MTNLAIFLRNIGLFPEIKIEDSGIRHEFLKEYDLANDQPYTLRAKGLDHKLEPYELGRALYHHGQRRGFLSNRKSAPKDTKEEKGIKKEIGELAGDIIKKKARTLGEYFSMTEPISEPIRGRYTSRKMYIDEFEQIWSKQSEFYPDILNEENRKKIFKIIFHQRPLKSQKHLIGECELEPNRFRAPWGILKAQRFRYLQLLCNLTVADDARSTQRPITDEEFELLQQNLELHGDITFAQARRLLGLGRFAKFNLELGGEKRIIGNKISAKLAKIFGEEIWSGFTEDKQNKIAEDLRCINNEDTLKSRGINVWGLNEEGAEKLSQIKLEDGYCRFSRQAIDRLLPMLERRVSLQTAIRELYPERWDNEQDRLDFLPPVSESGLPALRNPIVERTLTELRKVVNSIIAQYGKPNMIRIELARDLKQSGQQREKASRKIRANQRAREKAAKKIIEETGIENPTREDILKVLLAEECNWICPYTRKNISIGSILGDNPQFDIEHIIPFDRSLDDSFLNKTLCDAVENRKVKKNRTPYEAYHGSARWDEIVVRLSDFKSDVKFQKLRRFKMTPEEVQKELEGFTARQLNDTRWASRWAKQYLGLLYSGIKGDGIDAEGKRKVQAVGGPVTAHLRNQWNLNSILSDSDIKGRDDHRHHAVDAVVVGLTDAGSIKKLSGAAVSGYSGRKKFKEIEPPWDGFLEEVRNKIQSVTTSHRLSRRVRGAMHQESFYGKPRKDKDGKTYIHIRKPLESLSKKELKYIVDPVISDAIKTKLKELKQDDPKKAFADIENHPVLSGNHGKKTPIHRVRVRMNLSETFPVGKNHRTRHVLSDSNHHIEIVESTDPENEKINWEGLVVSLFEAYQRKKNGTPIVRREFGVNKKFLFSLANGDIIELDNAEGTARGLFIVRTVPKSKQIKFVPINDARAYKQDMWGGLTAKPDSLRRRRCRKLTVTPLGDVRTAND

SEQ ID NO: 16 - protein, 935 aa, Unknown
  Description of Unknown: uncultivated organism
  MG4-226 effector
MIDQKILGIDMGPNSLGWTLITANNGADLENPPILGVRVFDAGLDDLEIDAKGKSRNTARREARSRRRNLERRARRMHILARFLQRLGMFPEGNINRPDEKHELLNLMDKDFASPYALRAKALDSQLTLAELGRAIYHLAQRRGYLSNRKSIPKEDEKKGEVKKGISELEEQMAQSEARTLGEYFSKIDPRQKRIRQRYTNRKMYEDEFGLIWNSQKQHYPDLMTDKLRKKLYRIIFFQRPLKSQKGLIGECELERRKKRSPWVWPEAQRFRYLQRVNDLAVTDEYGRPVKDITPEQRQALIAELENNGDMTFPQIRRLLKLKGSDKFNLERGGEKKLPGNHTTAKMIGIFGAERWNALSEDEKDTIIEDWLSTVKDDVLARHGRERWGLDEKAEEAFGNLNLESGYCNFSRTALRKLLPFLEKGTALQTAIKECYPERWERKGVPLDFLPELKKSGLGDLRNPIVHRTLTELRHLVNAIIREHGKPDIIRIELARDLKQSPKQREDSWKRARANERDRKAAAQRILEETGIDNPSRDDILKVLLADECEWHCPYTGKQIHMNALVGDSPQFDIEHIIPFERCLDNSYLNKTLCHADENRHVKHSRTPYEAYHDTARWDEMIVRVEKFRGNGAYKKLRRFKMTPEDVRSLMDDFTTRQLNDTRWASRWAKQYLGLLYGGIDGDGIDASGKRRVQTVTGRATSFLRDQWELNRILGDGPGKSRDDHRHHAVDAVVIALTDPGAVKALSDSSKRGGEIGKRLFDKMQPPWEGFLEDVRLGIGNIIVSHSLKRRVRGALHKETIYGKIRKDKKGKSYVHKRVSIDTLSPKDIDKIIDAKAQSVIVEKMESLGESDPKKAFKEIENHPVRTDSNGTAIPIHKVRIRENIKEFLELDPTRRVKLCNNHHIAYYEVRNGDTVKWHAEVVSMFEAYQRLKNK

SEQ ID NO: 17 - protein, 958 aa, Unknown
  Description of Unknown: uncultivated organism with predicted taxonomy: candidate division Zixibacteria
  MG4-227 effector
MTNLAIFLRNIGLFPEIKIEDSGIRHEFLKEYDLANDQPYTLRAKGLDHKLEPYELGRALYHHGQRRGFLSNRKSAPKDTKEEKGIKKEIGELAGDIIKKKARTLGEYFSMTEPISEPIRGRYTSRKMYIDEFEQIWSKQSEFYPDILNEENRKKIFKIIFHQRPLKSQKHLIGECELEPNRFRAPWGILKAQRFRYLQLLCNLTVADDARSTQRPITDEEFELLQQNLELHGDITFAQARRLLGLGRFAKFNLELGGEKRIIGNKISAKLAKIFGEEIWSGFTEDKQNKIAEDLRCINNEDTLKSRGINVWGLNEEGAEKLSQIKLEDGYCRFSRQAIDRLLPMLERRVSLQTAIRELYPERWDNEQDRLDFLPPVSESGLPALRNPIVERTLTELRKVVNSIIAQYGKPNMIRIELARDLKQSGQQREKASRKIRANQRAREKAAKKIIEETGIENPTREDILKVLLAEECNWICPYTRKNISIGSILGDNPQFDIEHIIPFDRSLDDSFLNKTLCDAVENRKVKKNRTPFEAYHGSARWDEIVVRLSDFKSDVKFQKLRRFKMTPEEVQKELEGFTARQLNDTRWASRWAKQYLGLLYSGIKGDGIDAEGKRKVQAVGGPVTAHLRNQWNLNSILSDSDIKGRDDHRHHAVDAVVVGLTDAGSIKKLSGAAVSGYSGRKKFKEIEPPWDGFLEEVRNKIQSVTTSHRLSRRVRGAMHQESFYGKPRKDKDGKTYIHIRKPLESLSKKELKYIVDPVISDAIKTKLKELKQDDPKKAFADIENHPVLSGNHGKKTPIHRVRVRMNLSETFPVGKNHRTRHVLSDSNHHIEIVESTDPENEKINWEGLVVSLFEAYQRKKNGTPIVRREFGVNKKFLFSLANGDIIELDNAEGTARGLFIVRTVPKSKQIKFVPINDARAYKQDMWGGLTAKPDSLRRRRCRKLTVTPLGDVRTAND

SEQ ID NO: 18 - protein, 1029 aa, Unknown
  Description of Unknown: uncultivated organism
  MG4-228 effector
MENYAPASLTFGLDIGPNSIGWALISSDRQISSGVRIFPAGLDDLEMDGKGKSRNVERREARGRRRLLKRQVSRLVQLASHLQKINFLPKGDLTDSSQRHTLFENLDKRLASPYELRAKALDQKLEPYELGRALYHLAQRRGFLSNRKSQVKDEKEQKGMKKEISDLGKDIEKAGARTLGEFFSRIDPHTARIRARHTSRKMYEDEFEAIWVSQQKYYPDILTDEFKKIIKRAIFYQRPLKSQSHLIGQCELEPKCKRAPWALLIAQRFRFLQTLNNLLIFDQNNKRGRKLNDDERDWLTAELEKKEKLTFAQVRKNLNLKQAKFNLELDGDSKIIGNRTAAKLIDIFGEKRWAEFSQDERNAAVEDYRSIVKDETLKRRGQNFWGLDEEKAADFGNLSLEDKYCNFSVKAISKLMPLLEKGYPLQTAIKDAYPERFAKQGAPKDSLPPVRAPELPDLRNPIVERSLNELRRVVNALISRYGKPDIIRIELGRSLRQTAKQRENTTKKNNTLRREREQIRERIEKEIGIKDPSRTDIQKVQLAEECNWECPYTGKHISMASLLGDHPQFDIEHIIPFERCLDDSFMNKTLCGAEENRKVKKGRTPYEAYHGTDKWDDIIARIEKFHGDAARPKLRRFELDEKDVDGLLNNFTERQMNDMRWAARRAKQYLGLLYGGLNDDGIDSSGKRRVQAVGGAVTARLRGAWGLNNILGEEDIKTRDDHRHHAVDAIVVAMTSHDMVKTMSDAAKRGQFWNNRRLDDFPQPWDRFHAHVKNAVDNIIVSHRLSRRVRGALHKESFYGTPKKDNKGISYVAIKKPLEGLTPAEVEDIIHPTYRALVKQKLEETCEVPKKAFKDESGLPRWRDKNGRERVIRRVRIRMNRAEVFPVGEGHRTRYVTSDANHHIAIYKTGAHEKEKWDGEVVSLFEAYQRKKKDQPIVGKACGPGRTFLFSLAGGDITQLDNLDKPGRTLYVVRTVPKSKQLYFVPINDARKLSDIGKKGLTARPDSLRERHCRKVIVTPLGEVRDAND

SEQ ID NO: 19 - protein, 888 aa, Unknown
  Description of Unknown: uncultivated organism with predicted taxonomy: Kiritimatiella glycovorans
  MG4-229 effector
MIDQKILGIDMGPNSLGWTLITANNGADLENPPILGVRVFDAGLDDLEIDAKGKSRNTARREARSRRRNLERRARRMHILARFLQRLGMFPEGNINRPDEKHELLNLMDKDFASPYALRAKALDSQLTLAELGRAIYHLAQRRGYLSNRKSIPKEDEKKGEVKKGISELEEQMAQSEARSLGEYFSKIDPRQKRIRQRYTNRKMYEDEFGLIWNSQKQHYPDLMTDKLRKKLYRIIFFQRPLKSQKGLIGECELERRKKRSPWVWPEAQRFRYLQRVNDLAVTDEYGRPVKDITPEQRQALIAELENNGDMTFPQIRRLLKLKGSDKFNLERGGEKKLPGNHTTAKMIGIFGAERWNALSEDEKDTIIEDWLSTVKDDVLARHGRERWGLDEKAAEAFGNLNLESGYCNFSRTALRKLLPFLEKGTALQTAIKECYPERWERKGEPVDFLPELKKSGLGDLRNPIVHRTLTELRHLVNAIIREHGKPDIIRIELARDLKQSPKQREDSWKRARANERDRKAAAQRILEETGIDNPSRDDILKVLLADECEWHCPYTGKQIHMNALVGDSPQFDIEHIIPFERCLDNSYLNKTLCHADENRHVKHSRTPYEAYHDTARWDEMIVRVEKFRGNGAYKKLRRFKMTPEDVRSLMDDFTTRQLNDTRWASRWAKQYLGLLYGGIDGDGIDASGKRRVQTVTGRATSFLRDQWELNRILGDGPGKSRDDHRHHAVDAVVIALTDPGAVKALSDSSKRGGEIGKRLFDKMQPPWEGFLEDVRLGIGNIIVSHSLKRRVRGALHKETIYGKIRKDKKGKSYVHKRVSIDTLSPKDIDKIIDAKAQSVIVEKMESLGESDPKKAFKEIENHPVRTDSNGTAIPIHKVRIRENLEEC

SEQ ID NO: 20 - protein, 958 aa, Unknown; identical to SEQ ID NO: 17
  Description of Unknown: uncultivated organism with predicted taxonomy: candidate division Zixibacteria
  MG4-230 effector

SEQ ID NO: 21 - protein, 935 aa, Unknown
  Description of Unknown: uncultivated organism with predicted taxonomy: Planctomycetes bacterium
  MG4-231 effector
RRRGRRVRRWGGARTADSSTYPYRLRAAALNRRLEPDELGRALYHLAQRRGFLSNRKSTGKDEDEGLVKQGISELQARIDAASARTLGEYFAGIDPEHERIRRQWTARSMYQNEFDAIWRAQKQHHPKLLTDDYYQQVHRAIFFQRPLKSQKQLIGKCSLFPEARRALLADRLSQRFRMLQKVNDLRIRFGDFSERGLSSDQRKTVLRALDGSGEIKFTMLRGKKHLGLPKDAKFNFEYEDEKTLIGHRTDAKLRKAFGERWEAIEEADKDAIALDVASFQNSEALARRARKAWGLDESSARALADVKLEPGYSRHCRKAIRRLLEEMERGVSYATARRALYPESFASDEPLERLPPVRKVSKWRDSLRNPAVERTLTELRKLVNEIVRVYGKPERVHIELARDMKRSRRQREELTRDIASRTKERIRIAEKITREAKIASPKRSDIVKALLWQECGGVCPFTGRSIDFASLFGPNPQFDVEHIIPFSRSLDNGFLNKTLCHHDENRSRKGNRTPYEAYSSDPDNYDAILERVRRFQGGAARAKLRRFEMTELPDDWISRHLNDTRYASRLAADYVGLLFGGRSDPSGRQRIFVSTGGLTAHVRNELMLNGLLDDGGEKKRSDHRHHAVDALVVALATPAMVQHLQKAAEQASEQGRRIFVSVREPWVGFLAEAREAVARINVSRRLHKKLAGGLHKDTNYSKEYTRVGKNRKPEIVRHVRKPVDRMTDNEAAAIVDPIVREKVLAWRSGRDGKASAAPTDYPMMRGSDGVERPIKRARFAKVVSAVAVGAGARVRYVKPGSNHHTAIVARLDKQGYETTWEDHPVTRLGAHQRKSEGEPVIQTDWGPERAFKFSLSSNEYLLIDEEDENDVLICVLSVSKKMNECRRDYDGRPANEARKKGSGARIILSGDAMRKKNARKVCVTYLGDIVPAHD

SEQ ID NO: 22 - protein, 899 aa, Unknown
  Description of Unknown: uncultivated organism with predicted taxonomy: Acidobacteria bacterium
  MG4-232 effector
RRSDTLHTNIHTSGSVSRGHVMEDLPGTEYVLGVDLGASSVGWALLGLSDGEPVGVVRAGAHGFTAGTEGDIESGKDVSRATARREARQPRRQHWRRAWRKLKLGRLLQRHGLLPLGDLQDPKGLHDLLAKLDQRLREERPSGGDRVAAHLFPYRLRAAALDGTLSPHQLGRAIYHLGQRRGFQANRKADARDEERSVVKGGIKTLDEQIKASGARTLGEYFAKQDPEAQRIRGRWTSRQMYRDEFEAIWSAQRSHHPQLTDTLKAQLVAVMFDQRPLKSQRHLIGRCPLMGARRRAPLALRIAQRFRMLQKVNDLEYDNAAGVGQRLNDDQRQTLINALDSQGDLTFAKVRRLLKLPKDTEFNLEKGGEKKLVGNRTDAKLADAFGDRWQTLNELQKEQVVDDLLTIVNPMTLRRRARRVWGLDGEAAQQLAETHLEGDYAAHCRQALQILVVSMTDGTSYATARRQAFPEQFEPGDPLEALPPVLEAVSDLRNPAVCRALTELRKVVNAIIRRYGKPVMIRVELARDLKRSRKQREQAHNTMKANRKRREAAVKRILAESNIGDPRSDDIEKVLLAEECQWRCPYTGKSICMGSLLGPNPQFDVEHIIPLSRSLDNRFTNKTLCYHEENRQRKRKLTPYEAYSHDAERYGDILQRVRKFDGPAARAKLRRFMMAELPADEFTARQLTDTRYASRLAADYLGLLYGGRVDAGGRQRIQVSPGGVTAHLRNELQLNGILNDGGVKTRDDHRHHAVDAVAIALGSPAVVKQLADAADRADGTGRRFVGFKDPWPRFNEEVRRAIEAINVSYRPEGKIAGPLHADSLYSKAQTGPDGRPVRHIRKHLTKLTPTEINSSQIVDPVVRKLVQEAYTKLGGGNPAKAFADPTNHPRLPMRNGRS

SEQ ID NO: 23 - protein, 958 aa, Unknown
  Description of Unknown: uncultivated organism with predicted taxonomy: candidate division Zixibacteria
  MG4-233 effector
MTNLAIFLRNIGLFPEIKIEDSGIRHEFLKEYDLANDQPYTLRAKGLDHKLEPYELGRALYHHGQRRGFLSNRKSAPKDTKEEKGIKKEIGELAGDIIKKKARTLGEYFSMTEPISEPIRGRYTSRKMYIDEFEQIWSKQSEFYPDILNEENRKKIFKIIFHQRPLKSQKHLIGECELEPNRFRAPWGILKAQRFRYLQLLCNLTVADDARSTQRPITDEEFELLQQNLELHGDITFAQARRLLGLGRFAKFNLELGGEKRIIGNKISAKLAKIFGEEIWSGFTEDKQNKIAEDLRCINNEDILKSRGINVWGLNEEGAEKLSQIKLEDGYCRFSRQAIDRLLPMLERRVSLQTAIRELYPERWDNEQDRLDFLPPVSESGLPALRNPIVERTLTELRKVVNSIIAQYGKPNMIRIELARDLKQSGQQREKASRKIRANQRAREKAAKKIIEETGIENPTREDILKVLLAEECNWICPYTRKNISIGSILGDNPQFDIEHIIPFDRSLDDSFLNKTLCDAVENRKVKKNRTPFEAYHGSARWDEIVVRLSDFKSDVKFQKLRRFKMTPEEVQKELEGFTARQLNDTRWASRWAKQYLGLLYSGIKGDGIDAEGKRKVQAVGGPVTAHLRNQWNLNSILSDSDIKGRDDHRHHAVDAVVVGLTDAGSIKKLSGAAVSGYSGRKKFKEIEPPWDGFLEEVRNKIQSVTTSHRLSRRVRGAMHQESFYGKPRKDKDGKTYIHIRKPLESLSKKELKYIVDPVISDAIKTKLKELKQDDPKKAFADIENHPVLSGNHGKKTPIHRVRVRMNLSETFPVGKNHRTRHVLSDSNHHIEIVESTDPENEKINWEGLVVSLFEAYQRKKNGTPIVRREFGVNKKFLFSLANGDIIELDNAEGTARGLFIVRTVPKSKQIKFVPINDARAYKQDMWGGLTAKPDSLRRRRCRKLTVTPLGDVRTAND

SEQ ID NO: 24 - protein, 810 aa, Unknown
  Description of Unknown: uncultivated organism with predicted taxonomy: Bryobacter aggregatus
  MG4-234 effector
MTAWGLDAAAAEKFANTQLESGFSRFSRKALSKLLPQVEAGASITTAIMEVYPGRGPSRIMDSLPSVADSMPELRNPAVARALTELRKVVNSVISRHGKPAKIRVELARDLKKTRDQRKKASLNNRQNQKLREDAAQKILDQANIQNPSRDDILKVLLADECNWECPYTGRGISMKDLFGDNPQFDIEHMIPFARSMDNSYVNVTLCHHETNRNVKKNYTPFEAFGSSPEWDRIVNRVKKFNGRLAKVKLQRFTMEKLEDLDSFANRQLTDTRYASKLAKNYLGFLYGPESASRVQANSGGITAKLRNAWNLNSILGDGGEKSRDDHRHHAVDAVAIALSDMGIIRKLNTAYSRTPKGVKPWKIDFPEPWTGFLDQVRDSIDDIVVSRRVCKKVDARLHQETLYSKPKAGDDGKECRHVRKALSKLSKPELNKIVDPVVRQRVIDRMAELGGSDPSKLFAAPENLPCMETKDGRKIPIKKVRVRTNVNPITISKDTPKERYVLPGSNHHVEIFEYADKKGNVKWGGCVVTTLEAVKRRKDGLPIVNRDHGPEKKFLFSLAAHESVLMLDKDNKDPNIPEIFTVSKMSQMASGKLEIDFRRNADARQAQLRVETDKGIKNVTNYVFRVPNTLRQWAAKKVLITPIGEIGGPMIERIVDVSESGVHVRVKDEQLVLERERTPIWSAPLFEVAALVVSNPGATLTHRALAGLATNGAAVVVCDTKHLPVGMLLPLAANYVQAERFQLQARAGLPLKKQLWRQIVKAKISAQGRLLSELRGRDFGLGAMSKKVRSGDPDNLEGMAAKRYWPQLF

SEQ ID NO: 25 - protein, 1013 aa, Unknown
  Description of Unknown: uncultivated organism
  MG4-235 effector
MDIQKGKDESKSAKRRQMRLQRRQLRRRAARQCELFERLQGAGLLPSYSQPAPRTSSQKSLARHEILKVLDLELMARCKPRMAAIPAPDHVLPYYLRALALREQLEPYELGRALYHLGQRRGFRSNRREISKSKQEEQEKSKVYSGIAEIAAAMREKGVPTLGAFFASADPVNHRRIRGRWTARDMFESEFDAIWAAQAPHHPGLLTNDLRNKVRHLLFFQRPIAAQSHLIGRCELESGRKRAPLACLDAQRFRLLQKVNDLRIRSADCSERPLTGEERRKLAEALQTRGDLKFNEVRKLLGLPQRGNWFNLERGGEKKLPGNRTASKMLSAFGERWNHFTSQQRDQIVEDWHTAETEDWLIRRGMNRWGLDEKQAKLWAETNSEDGHSRLSRKALSKLLPLMETGLSFKEAEKQIYGTHFSGGTIHDLLPPVREEIPELRNPAVERALTELRKLVNAVVREFGKPSEIHVELARDLKRSREDRKELWKTFRRRQDNREKLRAEIERQTDLKNPSRSDIERVLLGEECGWICPYTGRSIRFASLFGDHPQFDIEHILPFSRCPDDSFANKTLCFQEENKMKSNRTPWEAYGPNPQRWEEILERVRRFQNPGKLKRFQVRSSEELAEFTSRQLNDTRYASKLAARYLGLPYGGRDSVEQDGTSRRKIYASPGGLTAILRRNWGLESILREPDAGANNQKPGKPRTDHRHHAIDAITIALSTPAAVKSLSDAAESNALRGRTSFKGTQAPWPHFVDSVRPHIESLLVSHRPERKLSGPLHDETLYGRPYEENGKTYVHVRKAIDGLTKNEVEHIVDPAVRAAVIRRLQQAGGDLKKVQAAGAEPPYLETEDAHRIPIYRVRIRKVLTPSAVGEGPRKRFVEPNNNHHTEIVAVLDNREDEIRWEGVPVTLLEALQRKRNDLPIVQRDHGTGYRFKFSLMKNDTIEINKNGNTERYLVRSVWSNGQLTLLRMNDARKQTEIKAAKEMWFPNAETIRKLNCRKIMVDLLGRVHPAND

SEQ ID NO: 26 - protein, 1038 aa, Unknown
  Description of Unknown: uncultivated organism
  MG4-236 effector
MDKVKANSTTLGIDLGPNSIGWALFRNDKSNKPGGLIATGTRVFHAGLDDLEMDGRGKSRNSKRREARSRRRLLERRRRRMTNLAIFLRNIGLFPEIKIEDSGIRHEFLKEYDLANDQPYTLRAKGLDHKLEPYELGRALYHHGQRRGFLSNRKSAPKDTKEEKGIKKEIGELAGDIIKKKARTLGEYFSMTEPISEPIRGRYTSRKMYIDEFEQIWSKQSEFYPDILNEENRKKIFKIIFHQRPLKSQKHLIGECELEPNRFRAPWGILKAQRFRYLQLLCNLTVADDARSTQRPITDEEFELLQQNLELHGDITFAQARRLLGLGRFAKFNLELGGEKRIIGNKISAKLAKIFGEEIWSGFTEDKQNKIAEDLRCINNEDTLKSRGINVWGLNEEGAEKLSQIKLEDGYCRFSRQAIDRLLPMLERRVSLQTAIRELYPERWDNEQDRLDFLPPVSESGLPALRNPIVERTLTELRKVVNSIIAQYGKPNMIRIELARDLKQSGQQREKASRKIRANQRAREKAAKKIIEETGIENPTREDILKVLLAEECNWICPYTRKNISIGSILGDNPQFDIEHIIPFDRSLDDSFLNKTLCDAVENRKVKKNRTPFEAYHGSARWDEIVVRLSDFKSDVKFQKLRRFKMTPEEVQKELEGFTARQLNDTRWASRWAKQYLGLLYSGIKGDGIDAEGKRKVQAVGGPVTAHLRNQWNLNSILSDSDIKGRDDHRHHAVDAVVVGLTDAGSIKKLSGAAVSGYSGRKKFKEIEPPWDGFLEEVRNKIQSVTTSHRLSRRVRGAMHQESFYGKPRKDKDGKTYIHIRKPLESLSKKELKYIVDPVISDAIKTKLKELKQDDPKKAFADIENHPVLSGNHGKKTPIHRVRVRMNLSETFPVGKNHRTRHVLSDSNHHIEIVESTDPENEKINWEGLVVSLFEAYQRKKNGTPIVRREFGVNKKFLFSLANGDIIELDNAEGTARGLFIVRTVPKSKQIKFVPINDARAYKQDMWGGLTAKPDSLRRRRCRKLTVTPLGDVRTAND

SEQ ID NO: 27 - protein, 1009 aa, Unknown
  Description of Unknown: uncultivated organism
  MG4-237 effector
MNYILGLDIGSSSLGWALVDSKNHKIVTGVRIFEAGVEGDMSSGRDESRAVKRREARLSRRQTWRRAARLKKLFKVLQCAGLLPEGERQEVITELDKNLFAAHKNELANAHVLPYYLRARALDERLDPYELGRAIHHLGQRRGYWSNRKAEKKEKEGVVKKGILELERKMKEVEARTLGEYFSQIDPEGERIRGHWTCREKMYKPEFEAIWTAQVPHHPELLTDELKKEVYDAIFYQRPLKSQAHLIGKCLFEKDRHNKFRNRAPWAFLPAQRYRFLQAVNNLRVIASMWDERNLTFEERTILIDKLEEKGDLKFSEIRKLLKLKKTKFNLERGGEKKIPGNRTAAKLVTIFGKERWQESSEETRNNIVNTLISARQDDKVEQLAKYAWRLGADKAEELTEVEIEEGYCRFSRQALAKLLPLLEEGMNTEKAIMEVYPESRSSVEPEDFLPPVLEKIEMRNPAVTRALTELRRIVNNIIARYGKPELIRVELARDIKRNRKERKKMSKNNRERETERKKAVSDILEQMDIQNPKRMDVEKVLLAEECDWHCPYCNATLGGMAGLFSGSVHIEHIIPRHRSLDNSFINKTLSCSKCNSQKGDRTPYEAFGASPKWEEILQRVRNFKSGIAREKLKRFKMDDDELDDFLSDFSHRQLNDTRYASREAADYLGCLYGGQIDANNKRRVQVSAGRVTSDIRNALQLNSVLGDGGLKTRIDHRHHAVDAIAIALTDAGTVKKLADAYKQSNEMRKEERREFWRNDFVNGIAWDNFLRDVRKSIGKIIVSHRVSRKVSGALHEETNYSPPRDEKGCRSDKGGFVHVRKSLVDIKKPMIKKIVDGGVKEAVEKHLEKHNGDMKKAFADTANHPHLLTKDGRKVPIHKVRIRVPGGAMQKVGSDKRERWVTPGSNHHVEIWKEKDSKGREKWDGDVVTMLEAVRRKKAGEPIVKRDHGEGKEFLFSLAPGDIIEIRHEHRNIPIGLYRIRTVPQSKQLMFVGINDARIANEIKSSGD

SEQ ID NO: 28 - protein, 1027 aa, Unknown
  Description of Unknown: uncultivated organism with predicted taxonomy: Balneolales
  MG6-3 effector
MKKVLGIDLGVASIGWGIIETDEKNENGRILKSGVRIFQGNEQRADAAPGESSNADRRNKRSVRRQRDRRTRRKINLYVTLKKNGLAPNKSEWDKWVSINPYTIRAKALDEKVSLHEFGRALYHLNQRRGYKSNRKAGSDKEGAVKEGISKVRNHMAKHNARTIGEYFHEIYDNHLQNDTEHDDFDWRIRDKYTHRKMFKEEFDALWDAQSVFHKELTNDLGEVLKKIIFHQRKMKSQSHLIGKCELETDKKRIAKAHLLFQEFRVLKNINNLSISDENGFPIKLTEGDRKLFKEIFDKKDKVSWSQLKTALINSGTIGNKNAVFNLERGGRKNIEGNRTNAALSHKKAFGEKWYELEDDFKKHVVDVLIHVDKPEIVKNLALNKWDRTEEQAEYITHKLTLEQRYGGFSEKAIKKLLPYLKKGMEESSAIKKAGYSLFEQNPGKMNQLPMPDQTIKNPVVYHALIELRKVVNGIIREYGMPDVIRVELARDLKAGYERRQKMTKKMRELEKKNDKAYKALQKEPFNIQYPGYNDIIWFNLWEECDKTCPYTGKTIPAEAFNSGEFQIEHILPFSRSLDNSYANKTLCEADFNRKKGNRTPWECVEAGIMEEDTMLQRIRNLPWNKRNKFTQKEIDEDKFLNRQLSDTRYISKEASSYLKHLSCERVEVVKGQTTSLLRHLWGLNGVLNKEGPDMKNRDDHRHHAIDAIVVAFTNRSTLKRLSDENKRIGTAEWMDADESGRATNDEIKRRLGGRIDLSEPWPTFRNDVEVSINNITVSHRVNRKVSGALHEETYYGPTDEPAPKNKEMMVLRKSVHQLSKKDLGLIRDETIRQIVNDEVQKRMDNGESQANAIASLEADPPFIISPKAKVPIRKVRLLMKKDPQIMHYFENKNGEEDRAALYGNNHHIAIYETSDKNGVKKQIGIVIPMMEAARRVKDGDPIVMKDYRPDHTFLYSLAKNDMIFNHEDEQIYRVQKINSDGTIMFRQNNVAMKGQSDPGVYFKSGSRLGASKIKISPIGEIFPAND

SEQ ID NO: 29 - protein, 992 aa, Unknown
  Description of Unknown: uncultivated organism with predicted taxonomy: Planctomycetes
  MG6-1 effector
MHSYTLGLDIGSKSIGWALIGTDKKPSITDVGVRVFPEGVDRDTKGLEKSKNATRREARGARRNRYRRNQRRNQLLKTLKSAGLLPEEDIEIRNIFKKDPYELRAKGLNEKLDLYEFGRAIFHINQRRGFRSNRKTGKSKEEGQITKSANELQEQIENEDCETLGEYFNKINPEEKRIRGHYTFRTMFENELDILWNKQAEFYPDILNEELLKNIRDDIIFYQRPLKPTDELIGDCELEPDEKRCARGDWYASRFRILQDVNNLKICNPDGSAQSLLPDQRKVLLDELSKKKDVTFSTIRKKLGLLETQEFNAEYEINEKGKKNEKIKGDLFNASMRNKNIFGPKMWDTMREEEKIEINDWLIELEDDDLRENLNKKYKLKEEQIENVIKISLPQRYMSFSRKAIKKLLPLMEKGKRTDEALDSVYPDRNKDIVIEEFDKLPLPEDLRNPIVNRAMFEVRKVVNSIVREYGKPAKIKIEMARDVRGGARERRELHFKMLDNEKRNEEIRKRLREIGISSPKRDDIIKYNLWEECGHICPYTGKHISQTALFGENPEFQIEHILPYDRSLDDSFMNKTLCHVHENIHVKRNQTPYETYGHNPGKFDELKQRVNKTAMTYWKKQKFWQKEINTDKIIERELNDTRYICREVIKYLKHICKDVSGTRGKVTSELAYQWGFIKDRDDHRHHAIDATVVAVTKPKHLHQLGESKYSKEGITFASPWHHFREELAEKVKHINISHRSCRKVSGALHEETAYGLTGQSDEKGQELFVYRKRLEDLTVSMVTKIVDPVVCKIVKKRLIEKGVDLERDKNIPKEVWNEPLYMKQSKSDKKVKIKKVRIQDIFNNMIFLNDESGKPYRAVAPGNNHHIEIFEYTDKKGKVKRGGNVVTMFEAIHRSQRGESVIQRDHGQDKKFICSLAQNEMFMLKIDNDEEVLHRIQKIDQNKRIILRPHTYGGKLSDLDKPPLIQRKSANTIEGYKVTVDPLGRIWPAND

SEQ ID NO: 30 - protein, 996 aa, Unknown
  Description of Unknown: uncultivated organism
  MG6-4 effector
MSELILGLDVGTTSLAGALVRVNGGETTLVDLFPPRIFPEGVKREKEYVKSKMQQRRLARSARRTNQRRRDRKRKLGSILRSAGLLPADRKSLSELCKIDPYFLRKQGLDNRLEPYEFGRALLHLNQRRGFKSSRGDGSFKNDNGVVATSTDELEQQMDADKARTLGEYFFRKRECDASVRIRAHYTLRDMYLSEFDLLWNKQKEYHPEILTDDLREEIRDRTIFFQRPLKLPDNPMGRCSCDPEEYRCLRADWHAQQFRILSEVNNLRIHDLRSSGELTADQRSKLVADLSGQKEKTFGSIRKLLGIKHEFNLEAGGRKKLKGNTVEDAAIKAFGERWNSLSGDLQADIRHAIVHADEEELCRLARDEWDLDDEQFEHILEAELSDGYSMHSVKAIVRMLPHMENGLGEYEARERCGYREYEQTEVFDLLPSPDNDWLFITNPVVKAALREVRHFVNAVIRKYGKPDLIRVEMVRETKHSIKLRNKIVGKQNRNEKLRNDIRDRLRKEFGVSNPNSSQIMAMKLWEEQGGLCIYSGRAITSKHLQERICGSRNLDIDHILPYSRTLDNGYDNKILCFRDVNAQKDNRTPHEWLEGAEYQDMLQRVQACKDTGMSFRKMKRFCQREIELNECIRRHLSDTAYIAREVKKYLGCLYSSPGRHVKSTNGQITREIRYEWGLDAILDPDGCVKNRNDQRHHAVDALVVALTSKKLLRQLARTKDRDNRIALPDPWPNFNTDVAERVENLLVSYRPTHRTSGSLHKDSIFSRNNSCRKRLDELTWSMISNICDYGIKSIIESFLESKGIRHGDKIQASTWSSGVTMPSGVPIKKVRVKNLVSRIEPLSGDRTVMLQSNHHIEVITNDDGQYDGRVVSMMESSRRARAGESMRRRGSKGMSSIVQRDHGDGRFVMSLHKNDTVLMDTPEGKDQLFRVQKFGITSGSPDIVFCHYSASRPKSPSKLKPWEKFKGTRAWSKFTKFNVRKVAVDVLGDISFPGD

SEQ ID NO: 31 - protein, 1005 aa, Unknown
  Description of Unknown: uncultivated organism with predicted taxonomy: Planctomycetes
  MG6-5 effector
MDSYTLGLDIGSNSIGWSLIKEDKNPTIIDIGVRVFPEGIDRDTKGAEISKNKTRRNARSSRRMHQRRSYRKSKLVKISREQGILPQEDKELDKLFLKDPYELRAKGIDEKISLFEFGRALFHLNQRRGFLSNRKSGKSKEDGVVTKSASELQSTIKKTGCRTLGEYLNKLDSTEERRRSYYTFRSMYEEEFEKLWEKQKEFYPKILNDDLKKVIKDETIFFQRPIRWDRDTIRDCDLEPGEKVCPRSDWHARRFRILQDINNLEIYNTDGSSDKLSDERRKVLLEELLNKKDMTFGALRKKYGLFESQTFNLEEGSADKKKAKLKGDEFAAQMRSAKILGKKGWEKLNESQRIEINDLIVDDDIEDNELVKILIDKYRFSQTQAEATLDISLPSKYSSFSKVALQKLLIYMEKGKLVHEAIQAVYGKPQAITNKGEIMDFLPMPEDLRNPIANRGLFEVRKLVNAIIREYGKPKKINIEMAREVKGSKRERDEIHLKQYKNERINEEARKTLIDDFKIPNPSRDDIIKYKLWVECNKVCPYTGKSISQHQLFGPNPEFQIEHIIPYSRCLDDSYMNKTLCFVDENKEKGNETPYEYYSEKIPKQYEQILQRIRTLPYPKRRRFSQQEVKLDNFIERQLNDTRYISREVVKYLKKLGVIVKGTRGQVTSELRHQWGLNNILDLAGEGLKNRDDNRHHSIDAAVTAVIGNEHLRELARTKFRKNNKEFKQPWPDFREELEEKIKHINVSYRVQRKVSGALHEETSYGPTGRKDEKGQDIFVYRKKLEDLTISMVNKIVDLVVRDIVKKRLVERGIDPEKDKKIPKEVWNEPLYMKTTKSDKKVQIRKVRIQDVFNNMIMLKDKKGKPCRAVAPGNNHHIEIFEYKDKKGGKKRDGRVITMFDAVQRSQKRESVVKRDYGDGKEFVCSLATNEMFIMDNVDGNTELYRIQKITQSGNNKTIILRPHTYAGKLSDSDKPPLIQRKSPNTLKGHKVTVDMLGRFHMAND

SEQ ID NO: 32 - protein, 993 aa, Unknown
  Description of Unknown: uncultivated organism with predicted taxonomy: Planctomycetes
  MG6-2 effector
MKSYTLGLDIGSKSIGWALIETGKKPSITDIGVRVFPEGVDRNTKGLEKSKNATRREARGARRNRYRRKQRRDHLVKTLKTSGLLPEEDIALNKLFKKNPYELRARGLNEKLDLYEFGRAIFHINQRRGFKSNRKTGKAKEEGQIAKSAGELQEEIEKEECKTLGEYFNKVNPEDKRIRGHYTFRTMYENELEKLWNKQAEFYPDILKEDLQKKIRDEIIFYQRPLKPTDELIGKCELEKDENGKPLKRCPRSDWYACRFRILQDVNNLRICNPDGSVDSLTPDQRRDIIDELSKKKEVKFSAIRKKIGLLETQEFNAEYEINDKGKKNDKLKGDLFNEAMRSKKIFGPKLWDAMTKEEKIKINDWLVELEDEELRENLINQYKLKEKQTENVLKISLPQRYMSFSRKAIKKLLPLMEEGKRTDEALDTVYPDRNKDIDIEEFYKLPLPEDLRNPIVNRALFEVRKVVNAIVREYGKPGKIKIEMARDVRGSARERRELHFKMLENEKRNEETRKRLREMGISAPKRDDVIKYNLWEECGHICPYTGKHISQVALFGDNPEFQIEHILPYNRSLDDSFINKTLCHVHENIHVKRNQTPYETYGHNPEKFEELKQRINRTSMSYWKRQKFWQKEIKTDKIIERELNDTRYICHEVIKYLKHICNDVSGTRGKVTSELAYQWGFIKDRDDHRHHAIDAAVVAVTKPKHLRQLGESKYSKDGVAFGPPWPNFREELAEKGKHINVSHRSFRKVSGALHEETAYGLTGQIDEKDQELFVYRKKLEDLTIPMVLKIVDPIVCDIVKKRLAEKGINLEKDKNIPKEVWNESLYMKQTKSDKKVKIKKVRIQGVFNNMIFLNDKSSKPYRAVAPGNNHHIEIFEYTDKNGKTKRGSKVVTMFEAVQRSQRGEPVVQREHGQCRKFICSLAQNEMFMLESEKGLTDLYRIQKINQNGQVFLRPHTYSGDLTKQKAVSKLPNKLKGHKVTVDMLGRVHMAND

SEQ ID NO: 33 - protein, 1003 aa, Unknown
  Description of Unknown: uncultivated organism with predicted taxonomy: Planctomycetes
  MG6-6 effector
MKGFTLGLDIGSKSIGWAIVGNGKKQSIIDIGVRVFPEGVDRDTKGSEKSKNATRREARGARRNRRRRNLRKEKLVKTLRKAGLLPEDNKALQTLLEKEPYQLRAKGLNEKLELLEFGRAIFHINQRRGFKSNRKTGKAKEDGKVAKEAGELQKKIEEAGCRTLGEYFASINPEEERIREQYTFRTMYEEEFDKLWNRQAEFYKNVLTGDMHKKIRDEIIFYQRPLKPTDDLIGDCELEAGEKRCPRGDWYARRFRLLQDVNNLKVYNPDGTARELEDDESGIILKKLATHKEVKFSSLRKELGLLKTQEFNAEYQIDNKGKKQEKLKGDEFNASMRNKNIFGAKTWDAMDEAEKITLNEWLVNLDDDELIEKLSSEYGLSDEQIDRVLKISLPQRYMSFSRKAIQKLLSLMEKGKRTDEALAEIYPDRNKRAKGEEKDRLDLPDDLRNPLVNRGLFEVRKLLNAVIREHGKPSGIVIEMARDVKGSLKEREEIQWKMRKNEKRNEAARTRLIQDMDIRNPSRDDVIKYKLWEECGKRCPYTGKVISITDLFGSNPVFQVEHILPYSRSLDDSYMNKTLCCVNENRIKGNKTPYEFYSGDEEKYEEVKQQIKVLPWPKRKKFLQKEINLDECIQREMNDTRYICKEVVKYLKQLGVNVRGSKGRVTAELRHQWGLNSILDLSSSNMKNRDDHRHHAIDAVVTAVTKNEHLRRLAESKYSKTDSSFSEPWEDFREEIAEKVKHINVSHRVRRKVSGKLHEDTSYGLTGVKDDKGQEIFVYRKKIEDLTIPMVSKIADHVVRQIIESRLKKHGIDLNKNQTIPKEVWTKPLYMKNTKSNKKVVIKKVRIRDAFNNMIFLKDKEGKSYRAVAPGSNHHIEIFEYTDKKGKMMRGGEIVTMFEAVKRKREDQPVIKRECGADKKFICSLAMNEMFMLDTNNEEKELHRVQKITQSGNSISIILRPHSYAGKVSDYDKPPIIQRRSPNTLKGHKVTVDMLGRVHLAND

SEQ ID NO: 34 - protein, 995 aa, Unknown
  Description of Unknown: uncultivated organism with predicted taxonomy: Planctomycetes
  MG6-14 effector
MAGYTLGLDLGSNSVGWAVLDVEGESVVDVGTRVFQEGVDRDTKGAEVSKNETRRTARGARRGRKRRNYRKDKLLRMLVRHGLLPECSKELQRVFDLDPYLLRAKGLDEKLESYEFGRVLYHLNQRRGFWSNRKSGTSKEDGVVTKDATAIAESIKNSGSRTLGEYFAGVDSHEDRIRGHYTFRAMYEEEFEALWAKQVSYDGELFTDDLKKSIKDETIFFQRPLRWDPETIGDCELEEGEKRCPRADWHARRFRILQTLNNLKIINPDGTNLELDDEQRKIILAELCDKKEVKFSVLRKKLGLIESQTFNLEEGSFDKKKASLKGDEFVQQLRSNNALGKNGFEKLSESDVIEINDALNDDDIGDEELVGQLIEQYGFSEEQAVGVVNISLPTKYTHFSRLALQKLLPKLEAGLRTDEAVKAVYGDRKVAGKTEKSERLGAVPELRNPIVMKALWEVRKVVNAIIGEYGVPRKIKIEMARDVKGSAKERDEIRLKQWKNEQENKKAEEELKLMGIRNPSFNDRLKYKLWEECGKECPYSGKAISQHQLFGEQPDVQIEHIFPYSRSLDDSYMNKTLCYVNENRLKGNETPYEYYAHAKPEQWEGILQRIKRLPYAKRRRFWQKEVVLDKFIERQLNDTRYISKEVVKYLKQLGCIVMGTKGQVTSELRHQWGLNNILDYTGAGLKNRDDHRHHAVDAVVTAVVEQKHLGELAASKYDNCGVEFGEPWEGFREDVGEKINGIKVSHRVTRKVSGQLHEETSYGPTGVKDEKGQEVFVYRKGLEALTLPMVGKIVDPVVRGIVCERLKEFGVDPEGKGKIGKEVWKEPLFMKSKQGKGPEIKKVRIRDVFNNMIFIKDEDGKEYRAVAPGNNHHIEIFEYEDKKGQTKRDGRVVTLYEAVRRSRKGEAVICRDYGDGKRFICSLSQNELFMLKIGEDDELILHRIQKLSSNSQIYFRRHTFAGDLQENKGISKLPNTLEGYKVTVDPIGRVHKAND

SEQ ID NO: 35 - protein, 991 aa, Unknown
  Description of Unknown: uncultivated organism
  MG6-15 effector
MKYTLGLDIGSKSIGWALVKDSSEHEISNIGVRVFPEGVDRDTKGAEKSKNEKRRDARGARRNRWRKRMRKDKLVKILRAKQLLPQSDNELEKLFIKDPYQLRTKGLDKKLEPFELGRVIFHLNQRRGFKSNRKSDKGQDGIVKKSATELQNKIDTANCRTLGEYFHKTDTNIERIRGNYTFRSMYEQEIEAIWNKQKEYYNEILNDEFKKQLLDETIFYQRHLKPPDNLIGNCELEPDQPRCPKGDWLAIKFRILQTVNNLKVQNPDGTERKLNEDQRQQLLEMLYSKKEVKFDDLRKKFGFYESQKFNLENNGKAKTIKGDEFASFMSSILGKKAWQTLTIEKKIQLNQALLELEDDELEKFMAEKFGLDEKSIEKVFKIPLPQKYMSFSKKAIETLLPFMEKGSLTHEAVEKAGYINNNGFNGKEQLDQLPLPDDLKNPLVNKALVEVRKLVNAIISEYGKPAKIKLEMARDMKGSLQERQEQHFKMLENEKINANARKELIENIGILKPSREDIIKYKLWQECARLCPFTGKPISQNALFGPEPQFQIEHILPYSRSLDDGYMNKTLCWVEENRLKGNQTPFEFYNGTENFDLILKRIEVLPYPKRKRFWQKEIELDKCIQRELNDTRYICRQVVGYLKQLGVTVTGTKGKSTDELRHSWGLNNILDLTGAGVKNRDDHRHHAVDAAVVAITTQKHLKDLASTKYSEKDRMFPQPWEGFREELEEKVNKIIVSHRATKRARGQLHEETNYGPTGRKDERGQDIFVYRKALESLTVAMVPRIVDPVVKNIVIERLSKFGIDINSKAKIGKEVWAEPLYMPCSKKDENGNPVKVPIKRVRIETVSNNMIMLKDTNGKTYRGVEPGNNHHISVYQLKNGKKTFEVISLYEAIKRKTSDLSIVNRTSSNEKCFMFSLAANDMFMLKVDQDYIPHRVQKIIQDGRIVLRPHTYAGKISDSDNPPLIQRKNYNTIEGYKIHIDRLGRIFPAND

SEQ ID NO: 36 - protein, 1022 aa, Unknown
  Description of Unknown: uncultivated organism with predicted taxonomy: Planctomycetes
  MG6-16 effector
MVSYTLGLDIGSHSIGWALLDTGKKTSILDIGVRVFPEGVDREKGQEKSKNATRREARGARRVHQRRNLRRDQIVKTLQSAGLLPKDDEQLKKLLNDKNPYELRKNGLDEKLKLYEFGRALFHINQRRGFKSNRKTGSLKEEGQIAKDAGELQSMIEKHGCRTLGEYFAGLNPKEQRIRGWYTFRSMYEKEFDLLWAKQFEYYPEVLADDLRKKVRNEIIFFQRPMRWDPDTIGDCQLEDGEKRCPRGDWYARRFRILQDMNNLKICNPDGTIETLTPEQRKTILDELNKKKEVRFTTIRKKLRLMDTQTFNLEYEINEKGKKREKLKGDDFASTMMGKKVFGRKKWEDMSEGQKIKLNNLFLGSEDNNELCTALASEYKLAEEKAEIASKVKLVSGYMSFSRKALQKLLPLMEEGKRTDEALDIVYSERNKTDEANETDKLDFPEDLRNPLVNCALFEVRKVVNAVVREYGKPKKIKIEMARDVRGNARQRKEIHFKMLDNKRRNEQTRKRLMEDMVIANPSRDDIIKYNLWIECGKVCPYTGKTISQEALFGPNPEFQIEHILPYDRSLDDSYMNKTLCEVYENIHVKKKQTPYETYSGDTERFEQLKQRVNRTAMPYWKKQKFWQKEIDTDKIISRELNDTRYINREVVKYLRQICSDVNGTRGKTTAELAYQWGFIKDREDHRHHSVDAAVIAVTGSEHLRQLGKSKYSDGTISFPPPWPHFREELAEKVKHINVSHRATKKASGKLHEETFYGLTKKAKNYFKKADKEKDIKRLSNNAWLCRRKLNYVYSRTPAEILKKVKDIDEITEDARNVKDAIRKKLIESGIDIYNKRSKIPKELFKETLYLQSNDGKRIPIKKIRVETSESNMVIFTDRKGNPYRACPTGGNHHIEIFEYTDQKGKKKRVGRVITMFEAVQRRLNEEPIIQKDYEDDKKFICSLAQNEMFMLEIEDGEQKLYRVQKITQSGNNITIVLRPHTYSGKVSDYDKPPIIQRRSPNTLKGHKVTVDMLGRVLLAND

SEQ ID NO: 37 - protein, 955 aa, Unknown
  Description of Unknown: uncultivated organism with predicted taxonomy: Planctomycetes
  MG6-17 effector
TKGAEKSKNATRREARGARRMRSRRNLRRDQLVGKLQSSGLLPKDKKELEALLEKEPYQYRAKGLDKHLELFELGRALFHINQRRGFKSNRKTGKGKEDGVVKKGASELLQKIDEAGCRTLGEYFAGINPEEQRVRQQYTFRSMYVNEFNKLWEKQCEFYPDILTEELRKKIRDEIIFYQRPLKPADHLIGNCELIENEKRCPRGDWYAIKFRIWQDINNLRIQNMDGTETVLTLEQKQSLFENLNEKKDIKFDAIRKKFNLMESQEFNLEQDGKVKTLKGNIFASGMKGKALFGPKRWDSMDEDEKIKLNRCCVELDDDELKEKMINEYGFTDEQVERVLKISLPQEYMSFSRKTIKKLLKYMEKGALTYEAIDKLIVEGEKKKREKATAKSDLLRWETIPELRNPIVQKGLYEVRKLVNALIRQYGKPAKIVIEMARDVKGNRREREEIHYKIQKKKKRNEEARTKLMQDMNILNPSRDDIIKYKLWEECATVCPYTGKSIAQHQLFSEHPEFQVEHILPYSRSLDDSYMNKTLCCVNENRIKGNQTPYEFYSGDEEKYEQVKQRIKVLPWPKRRKFLQKEINLDECINRELNDTRYICKEVVKYLGQLGIVVKGSKGRITAELRHQWGLNSILDLAGEDMKNRDDHRHHAIDAVVVAVTKNEHLRRLAKSKYSQVESSFIEPWANFREELAEKVKHIDISHRAARRVSGKLHEETAYGPTGRKDKKGQEVFVCRKKLEDLTGPMVSKIVDSTVRQIVTERLDKHGIEAANVNKIPKEVWTEPLHMKNTKSKKKVQIKKVRIESVFNINNMILLSDKSGKPYRAVKTGSNHHVEIFEYIDGDKKEQRDSEVVTMFEAVKRNREGKEVVRREHGAGTKFVCSLAINDMVMMKNKEGEIDLYRVQKMDKNKMVRFRHHTSATIDSRETYIDKTAHLFEGHKVTVDALGRIYPAND

SEQ ID NO: 38 - protein, 807 aa, Unknown
  Description of Unknown: uncultivated organism with predicted taxonomy: Planctomycetes bacterium
  MG6-18 effector
MSKYTLGLDIGSKSIGWALLQTHPKPSIIDIGVRVFPEGVDRDTKGLEKSKNATRREARGARRNRYRRNQRRNQLLKKLKSAGLLPESDIEIRNLFKKDPYKLRARGLNEKLDIYEFGRAIFHINQRRGFKSNRKTGKAKEEGQIAKSAGELQEEIKKEDCKTLGEYFDKVNPEEKRIRGHYTFRSMYENEMDKLWNKQAEFHPDILKEDLQKKIRDEIIFYQRPLKPTEELIGECKLETGEKRCARGDWHARRFRILQDVNNLKICNPDGSEQSLLSDQRKVLLDELGKKKDVTFSIIRKKLGLLETQEFNAEYEINEKGKKNDKLKGDLFNASMRSKNIFGPKIWDAINKEEKIKINDWLIELEDDELRENLKNKYKLKEEQIENMIKISLPQRYMSFSRKAIKKLLPLMEESKRTDEALDKVYPDRNKNIDMEEFDKLPLPEDLRNPIVSRAMFEVRKVVNSIGQEYGKADKIKSEMARDVRGSTRERRELHFKMLDNEKRNEETRKRLREMGIEEPKRDDIIKYNLWEECGHICPYTGKHISQTALFGENPEFQIEHILPYDRSLDDSFMNKTLCHAHENIHVKRNHTPYETYSHNPDKFDELKQRVNKTAMPYWKRQKFWQKEINTDKIIERELNDTRYICREVIKYLKYICKDVSGTRGKVTSELAYQWGFIKDRYDHRHHAIDAAVVAVTKPKHLNQLGKSKYSKEGIDFALPWPHFREELAEKVNQINVSHRARRKVSGKLHEETSYGLVSEKNKTGPDIFVYRKKLEDLTIAMVEKIIDPMVREIVKDRLIEKGIDLS

SEQ ID NO: 39 - protein, 1026 aa, Unknown
  Description of Unknown: uncultivated organism with predicted taxonomy: Planctomycetes bacterium RBG_13_60_9
  MG6-19 effector
MNNYTLGLDIGSKSIGWALLKTDKKPAIIDIGVRVFPEGVDRDTKGLEKSKNATRREARGSRRIRHRRNLRRDRLLDILKSTKLFPQNETSLIELFKINPYELRARGLDEKLKLHEFGRALFHISQRRGFKSSRKTDKSKEEGKISKAVGELQARIEKEGCRTLGEYFNKIDPEEMRIRGHYTFRSMYEREFDLLWDNQAKFYPKVLTEDLRKKIRDEILFFQRPVSWDPDTIGDCELEMDDNGKPLKRCPRGDWYAIRFRLLQDVNNLKICNPGGSVEPLKPEQRKALLEELSKKKEVKFSTIRKKLGLLETQIFNAEYEINDKGKKNERLKGDIFNSSMRNKRAFGPKTWDAMDDVEKIKLNEWLIELEDEELAEKLKSEYGLNNEQIEYVKKISLPQRYMSFSLKAIIKLLPLMEQGFLTHEAIKNAGYEQKQISISESVNKLPLPPNLRNPIVQRALYEVRKVINAIVNEYGKPDKIKIEMARDVYGSRRQREKLHWKMRENEKINEYARKRLIEDIEINRPTREDVIKYKLWEECGKTCPYTGRHISQTALFGPNPEFQIEHILPYNRSLDDSFMNKTLCQVHENIHVKRDQTPYEAYSNNPEKFEELKQRVNRTAMPYWKKKKFWQKDINTDEIISRELNDTRYICREVVKYLKQICKNVSGTRGKVTSELAYQWGFVKDRNDHRHHAIDATVVAVTKNKHLRQLGESKYSKEGLVFVPPWPHFREELSNKVEHIDVSHEPVRKVSGKLHEETFYGLTKDTKDYFKKNNKDGGIRQVSKKAWLCRKKLNYVYSRTPAEILKKVKDFDKITDGAKNVKDAIKKRLIDSKIDVSDKKAKIPKEVFKETLYLRTNNKKRIPIKKIRVETSESNMIIFTDKKGNPYKACPTGGNHHVEIFENIDRKGKKRRTGRVITMFESVQRSQRGESVVCRDYNDGKKFVCSLTQNELFMLELDDNRTILHRIQKITQSGTNISIILRPHTYAGRVSDSDKQPIIQRKSPNTLKGQKVTVDMLGRIHLAND

SEQ ID NO: 40 - protein, 1168 aa, Unknown
  Description of Unknown: uncultivated organism with predicted taxonomy: Flavobacteriales
  MG7-1 effector
MSNKTILGLDLGVSSIGWAIIERNDENGRIVKSGVRVIPSSKSELSVFKDFDKGKPASFSKERTEKRGIRRSYFRKKLRRAKLIEHLKENNMFDPELLGPKYSIDVWEWREKATKEKITLAQLGRVLLHINQKRGYKSNRKAIVDEESDSNWLNAINDNSKLLREKGITVGEYFYQEGKLHERKPKVKFALHFRMKVRIFNRKDYLDEIEQIWKKQSEFYPELTDELKESIIDHTIFYQRPLKSAKHLLSECRYEKMHKVIARSNPLFQLFRVLEKVNNLRAEDAFGNNREITDEEKLKIIEACTSAQSWKLLDKKKNLSKSKIKSILGLGKDYEINLDSIEGSKTLHSIWEVLMKSWGEAGDWIDFDWSIQGNDFSKQKSYQLWHALYSIDEPQYLRKKLCEGFGFDLDTARLLMNIRLESDYGALSARAIKRIIPELLKFPKDATKAIENAGYKFTDSETKEERESRELKDRIEHLKKGALRNPVVEKVLNQLVTLVNAIYAHPELPNPDEIRVELARELKSGAKERRRAELGMARAAKDNDRIRELLQTEFGIPYPGRRDILRYRFWEEQDMRCVYSGDVIPRNKLFVGEEYELDHIIPRARLFNDSNSNLVLVKSSENKDKSDMTAADYMKSKGEKAFEEYLVRVKNLYDKGAKKKAGERGSGINKGKRNFLIMKKEEIPQDFIERQLRESQYIVKEAVKLLKEVCRDVTTTTGKITDLLKHQWGANDVFRNIQVPKYRKWGMTETIVDRKTGEVIERIIDWSKRKDHRHHALDAIIVACTRQSYIQQLNRLNVLYENDYESLKSYRKFELPWPSFHNDLISSLESLLVSFRNKRRVATMNKNRIKVGGKKKYIVQKTLTPRDAFHLETTYGRRLVNNYKLVKLNKKFSMELAELVIDPDLKEKILNRLMEFGNDPQKAFANLKKNPFKWKNENLEEVLIYDEVFTTRKKLDEKFNNPSEIIDPEVREIVTQRLKEFDNNPKKAFADIENKPVWYNKDKQIRIKTVNTRAKASDLYPVRTKENGNPKDFVFTRNNHHITVYQKEDGKYYDKVTSFWEAFELKKAKMPIYKENDDAAKAVLHLKINDMVLVDLNPEDLDQNDPEFFNTLSEHLYRVQKLASGDVTFRHHLETELSNKNTEVRVTNAESLYNRVVMYPLDVLGLPK

SEQ ID NO: 41 - protein, 1157 aa, Unknown
  Description of Unknown: uncultivated organism with predicted taxonomy: Chitinophagales
  MG7-11 effector
MQSKKILGLDLGVASIGWAFIKEYVNQKPEIVDMGVRVIPATKDESSVFLDFEKGKPASFSKERTTKRGIRRNNFRWKLRRDRLIKILKEHKMFDAQTLEQEQPHEIWELRAKAVTEQISLVELGRVLLHINQKRGFKSNRKANTAEDEGTEFKQALSSNMQILEERNQTIGQYLFEELSKTPSFSSKNKTFSRSGHIDEFERIWETQAKYHSALTEDLKNEIGERTIFYQRPLKSAKHLLSNCRFEKHHKVIARSSPLFQYFRSFELVLNLRFTDSLGTDRPLTNEEMKLLLQHLTVPNLKSSMLDKKHDLTEAKIRKLIDGLGKEYECSHSKIEGCRTLRAIHLVLEEHGVDSEQWIDFNPLAEKPDEQKSYQLWHCLYSIESPEDLRRTLCEKFGFDITTANALMRIKLEDDYGSLSSRAIKRILKAFNEFPENAAHGVLMAGYKSSDSETQEERATRELLDQLPHLKKGELRNPVVEKVLNQLITLVNEIIASDEFGRPHEIRIELARDLKSGAKERKRKEQAINKARKENEEIRDILSKEFGIKRPSRQDIFRHRCWIEQKHQCLYSGDPIPRSKLFSDAEYDLDHIIPRARMYDDSFANRVLVKTSENRTKSDATAFDFMSGKGDSKLNEYKVRVKSLYDEGTGRKSGELQKPGIGRAKRDFLLMPANEIPQDFIDRQLRESQYIVKAAMKLLKQVCREVTPTAGKITDLLRHQWGLTDLLKEMQIPKYREWGLTETVDGQERIKDWSKRLDHRHHAVDALVVACTTRSFIQKLNTLNALYEDDDPTVRLSIRNIEEPWAGFRKDAKEATEAILVSFRNRRRVATWSKNRIKQRGGKSHKQRVLVPRGFLHLETVYGERLVDRGRILKINKRLTRSDAELIINRKVREAIINRLSKFNNDSEAAFKNIKKAPLYIDEKRIDEVRVYDRIFVYRQNLNDQFKKTNAIVDPEIRAVVEAHLQAHGNDAKKAFGNLEENPVWYNKSKGIQIRSVNVQQKAEDLVPVRTKEDGTPKDFVFTRNNHHIAFFIDEKGKAYDEVITFWDAYERKRQGLSEYPEKSSKGDRKVFHLKINDLVLIDLNPNEADFQSKKGRQEVSKHLFRVQKLASGDVSFRHHLETTLDNKRTEVRITSAKMMVERIHPVRHDILGRLQA

SEQ ID NO: 42 - protein, 1168 aa, Unknown
  Description of Unknown: uncultivated organism with predicted taxonomy: Porphyromonas
  MG7-12 effector
MSNKTILGLDLGVSSIGWAIIERNDENGRIVKSGVRVIPSSKSELSVFKDFDKGKPASFSKERTEKRGIRRSYFRKKLRRAKLIEHLKENNMFDPELLGPKYSIDVWEWREKATKEKITLAQLGRVLLHINQKRGYKSNRKAIVDEESDSNWLNAINDNSKLLREKGITVGEYFYQEGKLHERKPKVKFALHFRMKVRIFNRKDYLDEIEQIWKKQSEFYPELTDELKESIIDHTIFYQRPLKSAKHLLSECRYEKMHKVIARSNPLFQLFRVLEKVNNLRAEDAFGNNREITDEEKLKIIEACTSAQSWKLLDKKKNLSKSKIKSILGLGKDYEINLDSIEGSKTLHSIWEVLMKSWGEAGDWIDFDWSIQGNDFSKQKSYQLWHALYSIDEPQYLRKKLCEGFGFDLDTARLLMNIRLESDYGALSARAIKRIIPELLKFPKDATKAIENAGYKFTDSETKEERESRELKDRIEHLKKGALRNPVVEKVLNQLVTLVNAIYAHPELPNPDEIRVELARELKSGAKERRRAELGMARAAKDNDRIRELLQTEFGIPYPGRRDILRYRFWEEQDMRCVYSGDVIPRNKLFVGEEYELDHIIPRARLFNDSNSNLVLVKSSENKDKSDMTAADYMKSKGEKAFEEYLVRVKNLYDKGAKKKAGERGSGINKGKRNFLIMKKEEIPQDFIERQLRESQYIVKEAVKLLKEVCRDVTTTTGKITDLLKHQWGANDVFRNIQVPKYRKWGMTETIVDRKTGEVIERIIDWSKRKDHRHHALDAIIVACTRQSHIQQLNRLNVLYENDYESLKSYRKFELPWPSFHNDLISSLESLLVSFRNKRRVATMNKNRIKVGGKKKYIVQKTLTPRDAFHLETTYGRRLVNNYKLVKLNKKFSMELAELVIDPDLKEKILNRLMEFGNDPQKAFANLKKNPFKWKNENLEEVLIYDEVFTTRKKLDEKFNNPSEIIDPEVREIVTQRLKEFDNNPKKAFADIENKPVWYNKDKQIRIKTVNTRAKASDLYPVRTKENGNPKDFVFTRNNHHITVYQKEDGKYYDKVTSFWEAFELKKAKMPIYKENDDAAKAVLHLKINDMVLVDLNPEDLDQNDPEFFNTLSEHLYRVQKLASGDVTFRHHLETELSNKNTEVRVTNAESLYNRVVMYPLDVLGLPK

SEQ ID NO: 43 - protein, 1154 aa, Unknown
  Description of Unknown: uncultivated organism with predicted taxonomy: Bacteroidales
  MG16-1 effector
MIKNILGLDLGVGSIGWALIQTEDDQPKQIIGMGSRIVPLTKDDSDQFTKGQAISKNAERTARRTTRKGYDRYQLRRALLTQVLRQNGMLPECMDENMIDLWKLRSDAATEGKQLTLQQIGRVLYHINQKRGYKHAKSDDNGDSKQTKYVEAVNLRYKEIQEKNVTVGQHFYAELLNSKVESGNGPYYTFRIKDKVFPRAAYIAEFDQIMGVQKEYYPNVLTDELIETLRNRIIFYQRPLKSCKHLVGLCEFEMRPYKKDGKIVYGGPKCAPRTSPLAQLCAMWETVNNITLTNRNNERLEISNEQRRQLVQFLCTHETLKLTDLYKILGITKKDGWYGGKAIGKGIKGNVTLNQLRKALDGKYSQWLEMPIERIDVVDRNTAEAFWAVSPKVEETPLFQLWHAVYSLQNVEELTKTLQNRFSITDPQVIDALCKIDFVKPGYANKSHKFIRRLLPYLMEGMMYSEACACIQINHSNSMTKAEREARPLAERIELLQKNALRQPVIEKILNQMINLVNRLQQEYGPIDEARVELARELKQSREERKDAFDRNNKNEKRNKEISALISEQGIRPSRSRIQKYKMWEESEHRCMYCGKVVNLSEFLNGADVEIEHIIPRSILFDDSFSNKVCACRDCNREKDNMTAMDYMASKPEGEFEAYKQRVDEAFNAHRISKTKRDHLLWRRADIPQDFIDRQLRLSQYIATKAVEILQQGIRQVWTSGGGVTDFLRHQWGYDEILHTLNLPRYRQVEDLTEMVHYEHAGQEHDEERIKNWSKRIDHRHHAIDALTVALTRQSYIQRLNTLEASHEHMEKLVKEANTPYKEKKSLLEKWVALQPHFSVEEVTTQVDGILVSFRAGKRVTTPARRAVYHGGKRTIVQRGIQVPRGALTEDTIYGKLGDKFVVKYALDHPSMKPENIVDPTIRLLVENRITALGKKDAFKTPLYSAEGMEIKSVRCYTSLSEKGVVPIKYNEKGNAIGFAKKGNNHHVAIYKDQSGQYQEMVVSFWDAVERKLYGVPTVITNPKTVWDELLEKELPQDFLEKLPKDNWQYVLSMQENEMFVLGMEEDEFNDAIDTQDYNTLNKHLYRVQKLSHADYTFRFHTETKVDDKYDGVENGRNTSMSLKALVRIRSFNGLFTQFPHKVKIDIMGRITKA

SEQ ID NO: 44 - protein, 803 aa, Unknown
  Description of Unknown: uncultivated organism with predicted taxonomy: Bacteroidales
  MG16-232 effector
ALGGKYDHLLQMNMQMVDYVDEATGEVISCISEAIEQEPLYRLWHVVYSVQEREELGKALYKQFGIDDEAVVEALFKIDFVKPGYANKSHKFIRKLLPYLMKGYKYSEACDHIYVNHSNSITKEQNATRELVDKIPLLLKNELRQPIIEKILNQMINIVNALKEQHGNIDEVRVELARELKQSKDERAQTTERINKNERENKAIEERIREHGIRPSRARIQKYKMWEESQHQCFYCGKSISAAEFLSGADVEVEHIIPKSILFDDSFSNKVCACRDCNHTKDNLTARDFMETRGQVELDAYLARVNTAFEEGRISKTKRDHLLWHKEEIPQDFIDRQLRQSQYISKKAVEILRSAIRDVYATSGSVTDFLRHIWGYDQILHNLNLPKYRDAELTEFVTYDHRGQEHQEERIKNWSKRIDHRHHAIDALTIALTRQGYIQRLNNLNASHDDIAEAVRKVNPLMEKKYSLLEKYIYIQPHFTVQEVTDKVDGILVSFRAGKKVTTPAKRAIYRKGKRINVQDGLLVPRGALTEETVYGKLGNKYVVKYPLTHPSMKVDDIVDPTIREIVRARLAAFGGKAKDAFAKPLYSDAAQTMEIKTVRCYTGLQDKAVASVRFNAQGEAIGFAKTGNNHHIAIYQDAKEQYQESVVSFWQAVERKRYGLPIVIEDPKTIWDKLLDSDLPQEFLSTLPQDDWQFVVSLQANEMFILGMEDGDFEMAMQNKDYQLLNKYLYRVQKIRGKEYTFRYHVETTVDDKYSNEKGESKPNPALSMQMKKLISIRSFGGWLAQHPHKVRVNLLGEISEV

SEQ ID NO: 45 - protein, 135 aa, Unknown
  Description of Unknown: uncultivated organism
  MG1-280 RuvC-III domain
RQLIALHFGYQEMANSEIRHIFVSDGTITKAIRKQYELNNWLLTNQEAQELNGLLNQLSDTSKQQSLEEKNIILRSVKKLNKKQLNNGKRHALNAFCLSFTSHLQKKIIQDAEPENLKISTLDNLKPQARSILNE

SEQ ID NO: 46 - protein, 169 aa, Unknown
  Description of Unknown: uncultivated organism
  MG2-4 RuvC-III domain
TQTGYLMKYAVGEARKFFRSAPRQPRFIHLEGRVTTFFKKAWRLTETLAPISPLFLREYADPRTGRWQSTVRPKAELRRFTQLHHALDALTLGLATALVPGIERKELRRALSLRQAKGDDATLLRSDPKLGEALRWRTEDRFEAAPLSGKLESAVRRALAEGRVVQHVP

SEQ ID NO: 47 - protein, 154 aa, Unknown
  Description of Unknown: uncultivated organism with predicted taxonomy: Verrucomicrobia
  MG2-90 RuvC-III domain
TQTSQLSRLGQQVLRAPFVHLTKQPTFIALPGQVTARVRAAWDVLGCLAEAAPAVLEADGKAKNKTEIREITHLHHALDACVLGLAAARIPNRGDIWRLLLERRLDAGQRTQLEVLDLGGFDANGGFRLRDLPDELKQQLRQRLAERRVVQHVP

SEQ ID NO: 48 - protein, 127 aa, Unknown
  Description of Unknown: uncultivated organism
  MG4-2 RuvC-III domain
NDTRYASLLAVQYVGMLYGGAVDAGHVRRVQAAKGGTTGYLRDMYGLGFVLGEGRKERSDHRHHAVDAVAIALTDPAALKSISQAASDERRGGRVSFGAVALPWVDFIGDVQAAIEAINVSHRPSRK

SEQ ID NO: 49 - protein, 131 aa, Unknown
  Description of Unknown: uncultivated organism
  MG4-1 RuvC-III domain
NDTRWASRWAKQYLGLLYSGIKGDGIDAEGKRKVQAVGGPVTAHLRNQWNLNSILSDSDIKGRDDHRHHAVDAVVVGLTDAGSIKKLSGAAVSGYSGRKKFKEIEPPWDGFLEEVRNKIQSVTTSHRLSRR

SEQ ID NO: 50 - protein, 126 aa, Unknown
  Description of Unknown: uncultivated organism
  MG4-3 RuvC-III domain
QDTRYTSRLAADYVAVLYGGRSDAGGRLRVQVSPGGVTYHLRRAWQTNAILGGPEKNRSDHRHHAIDAVMIALTTAGVVKQLGDAARKTTPRKYPFSSLPDPWPGFNDELKRVVDGIIVSFRPDRR

SEQ ID NO: 51 - protein, 145 aa, Unknown
  Description of Unknown: uncultivated organism
  MG4-4 RuvC-III domain
NDTRYISRLATKYLGALYGAVDGVEPSATDEKGTRRIQVSTGGATAWLREEWGLNRILAKKGERPKKNRDDLRHHAVDALVVALVGPKETQTLSKAAQKASELGLKRNFLNSEIAPPSTATGEAFLDVVARAVDRIVVSHRVDRK

SEQ ID NO: 52 - protein, 131 aa, Unknown; identical to SEQ ID NO: 49
  Description of Unknown: uncultivated organism
  MG4-1 RuvC-III domain

SEQ ID NO: 53 - protein, 132 aa, Unknown
  Description of Unknown: uncultivated organism
  MG4-219 RuvC-III domain
NDTRWASKWAKQYIGLLYGNVNADGIDAENRRRVQATTGPVTAFLRSVWGLNGILSDGPAKSRDDHRHHAIDALVIALADSAIVKQLNDAASRAGVAHQRLFFFMDLPWDGFVRDVESAVGNLVVSHRVSRR

SEQ ID NO: 54 - protein, 128 aa, Unknown
  Description of Unknown: uncultivated organism
  MG4-220 RuvC-III domain
NDTRFASRLAMDYLGLLYGGRVDEKHVRRLQASSGRVTAHLRRAWQMNAILGMNGHKSRGDHRHHAVDAIAVALAGPRTIELLAHAAQQAWEVGGRLYAPVTEPWRGFLNDARRVIADIAVSRRVNRR

SEQ ID NO: 55 - protein, 131 aa, Unknown; identical to SEQ ID NO: 49
  Description of Unknown: uncultivated organism
  MG4-221 RuvC-III domain

SEQ ID NO: 56 - protein, 135 aa, Unknown
  Description of Unknown: uncultivated organism
  MG4-222 RuvC-III domain
NDTAYASSIAAKYLGSLYGGVNDAEGRKRIQATSGRATSYFRSLWKLNSILNDGPTTGGGAILKSRGDHRHHAVDAVVIGLTDAAMIKRLSDAAQRAPLEHRRRFASLEAPWPNFVDSVRAEIDKIVVSHRVSKK

SEQ ID NO: 57 - protein, 88 aa, Unknown
  Description of Unknown: uncultivated organism
  MG4-223 RuvC-III domain
SDTRYTSRLAADYAALLFGGRVDSEGRRRVDVSAGQATAILRRAWGLGGLLGGGGGKNRTDHRHHALDAVVVALTGPTEVKEIAKAAK

SEQ ID NO: 58 - protein, 140 aa, Unknown
  Description of Unknown: uncultivated organism
  MG4-224 RuvC-III domain
NDTRYASKLAARYLGLPYGGRDSVEQDGTSRRKIYASPGGLTAILRRNWGLESILREPDAGANNQKPGKPRTDHRHHAIDAITIALSTPAAVKSLSDAAESNALRGRTSFKGTQAPWPHFVDSVRPHIESLLVSHRPERK

SEQ ID NO: 59 - protein, 131 aa, Unknown; identical to SEQ ID NO: 49
  Description of Unknown: uncultivated organism
  MG4-225 RuvC-III domain

SEQ ID NO: 60 - protein, 132 aa, Unknown
  Description of Unknown: uncultivated organism
  MG4-226 RuvC-III domain
NDTRWASRWAKQYLGLLYGGIDGDGIDASGKRRVQTVTGRATSFLRDQWELNRILGDGPGKSRDDHRHHAVDAVVIALTDPGAVKALSDSSKRGGEIGKRLFDKMQPPWEGFLEDVRLGIGNIIVSHSLKRR

SEQ ID NO: 61 - protein, 131 aa, Unknown; identical to SEQ ID NO: 49
  Description of Unknown: uncultivated organism with predicted taxonomy: candidate division Zixibacteria
  MG4-227 RuvC-III domain

SEQ ID NO: 62 - protein, 132 aa, Unknown
  Description of Unknown: uncultivated organism
  MG4-228 RuvC-III domain
NDMRWAARRAKQYLGLLYGGLNDDGIDSSGKRRVQAVGGAVTARLRGAWGLNNILGEEDIKTRDDHRHHAVDAIVVAMTSHDMVKTMSDAAKRGQFWNNRRLDDFPQPWDRFHAHVKNAVDNIIVSHRLSRR

SEQ ID NO: 63 - protein, 132 aa, Unknown; identical to SEQ ID NO: 60
  Description of Unknown: uncultivated organism with predicted taxonomy: Kiritimatiella glycovorans
  MG4-229 RuvC-III domain

SEQ ID NO: 64 - protein, 131 aa, Unknown; identical to SEQ ID NO: 49
  Description of Unknown: uncultivated organism with predicted taxonomy: candidate division Zixibacteria
  MG4-230 RuvC-III domain

SEQ ID NO: 65 - protein, 128 aa, Unknown
  Description of Unknown: uncultivated organism with predicted taxonomy: Planctomycetes bacterium
  MG4-231 RuvC-III domain
NDTRYASRLAADYVGLLFGGRSDPSGRQRIFVSTGGLTAHVRNELMLNGLLDDGGEKKRSDHRHHAVDALVVALATPAMVQHLQKAAEQASEQGRRIFVSVREPWVGFLAEAREAVARINVSRRLHKK

SEQ ID NO: 66 - protein, 127 aa, Unknown
  Description of Unknown: uncultivated organism with predicted taxonomy: Acidobacteria bacterium
  MG4-232 RuvC-III domain
TDTRYASRLAADYLGLLYGGRVDAGGRQRIQVSPGGVTAHLRNELQLNGILNDGGVKTRDDHRHHAVDAVAIALGSPAVVKQLADAADRADGTGRRFVGFKDPWPRFNEEVRRAIEAINVSYRPEGK

SEQ ID NO: 67 - protein, 131 aa, Unknown; identical to SEQ ID NO: 49
  Description of Unknown: uncultivated organism with predicted taxonomy: candidate division Zixibacteria
  MG4-233 RuvC-III domain

SEQ ID NO: 68 - protein, 124 aa, Unknown
  Description of Unknown: uncultivated organism with predicted taxonomy: Bryobacter aggregatus
  MG4-234 RuvC-III domain
TDTRYASKLAKNYLGFLYGPESASRVQANSGGITAKLRNAWNLNSILGDGGEKSRDDHRHHAVDAVAIALSDMGIIRKLNTAYSRTPKGVKPWKIDFPEPWTGFLDQVRDSIDDIVVSRRVCKK

SEQ ID NO: 69 - protein, 140 aa, Unknown; identical to SEQ ID NO: 58
  Description of Unknown: uncultivated organism
  MG4-235 RuvC-III domain

SEQ ID NO: 70 - protein, 131 aa, Unknown; identical to SEQ ID NO: 49
  Description of Unknown: uncultivated organism
  MG4-236 RuvC-III domain

SEQ ID NO: 71 - protein, 135 aa, Unknown
  Description of Unknown: uncultivated organism
  MG4-237 RuvC-III domain
NDTRYASREAADYLGCLYGGQIDANNKRRVQVSAGRVTSDIRNALQLNSVLGDGGLKTRIDHRHHAVDAIAIALTDAGTVKKLADAYKQSNEMRKEERREFWRNDFVNGIAWDNFLRDVRKSIGKIIVSHRVSRK

SEQ ID NO: 72 - protein, 140 aa, Unknown
  Description of Unknown: uncultivated organism with predicted taxonomy: Balneolales
  MG6-3 RuvC-III domain
SDTRYISKEASSYLKHLSCERVEVVKGQTTSLLRHLWGLNGVLNKEGPDMKNRDDHRHHAIDAIVVAFTNRSTLKRLSDENKRIGTAEWMDADESGRATNDEIKRRLGGRIDLSEPWPTFRNDVEVSINNITVSHRVNRK

SEQ ID NO: 73 - protein, 105 aa, Unknown
  Description of Unknown: uncultivated organism with predicted taxonomy: Planctomycetes
  MG6-1 RuvC-III domain
NDTRYICREVIKYLKHICKDVSGTRGKVTSELAYQWGFIKDRDDHRHHAIDATVVAVTKPKHLHQLGESKYSKEGITFASPWHHFREELAEKVKHINISHRSCRK

SEQ ID NO: 74 - protein, 118 aa, Unknown
  Description of Unknown: uncultivated organism
  MG6-4 RuvC-III domain
SDTAYIAREVKKYLGCLYSSPGRHVKSTNGQITREIRYEWGLDAILDPDGCVKNRNDQRHHAVDALVVALTSKKLLRQLARTKDRDNRIALPDPWPNFNTDVAERVENLLVSYRPTHR

SEQ ID NO: 75 - protein, 115 aa, Unknown
  Description of Unknown: uncultivated organism with predicted taxonomy: Planctomycetes
  MG6-5 RuvC-III domain
NDTRYISREVVKYLKKLGVIVKGTRGQVTSELRHQWGLNNILDLAGEGLKNRDDNRHHSIDAAVTAVIGNEHLRELARTKFRKNNKEFKQPWPDFREELEEKIKHINVSYRVQRK

SEQ ID NO: 76 - protein, 105 aa, Unknown
  Description of Unknown: uncultivated organism with predicted taxonomy: Planctomycetes
  MG6-2 RuvC-III domain
NDTRYICHEVIKYLKHICNDVSGTRGKVTSELAYQWGFIKDRDDHRHHAIDAAVVAVTKPKHLRQLGESKYSKDGVAFGPPWPNFREELAEKGKHINVSHRSFRK

SEQ ID NO: 77 - protein, 115 aa, Unknown
  Description of Unknown: uncultivated organism with predicted taxonomy: Planctomycetes
  MG6-6 RuvC-III domain
NDTRYICKEVVKYLKQLGVNVRGSKGRVTAELRHQWGLNSILDLSSSNMKNRDDHRHHAIDAVVTAVTKNEHLRRLAESKYSKTDSSFSEPWEDFREEIAEKVKHINVSHRVRRK

SEQ ID NO: 78 - protein, 115 aa, Unknown
  Description of Unknown: uncultivated organism with predicted taxonomy: Planctomycetes
  MG6-14 RuvC-III domain
NDTRYISKEVVKYLKQLGCIVMGTKGQVTSELRHQWGLNNILDYTGAGLKNRDDHRHHAVDAVVTAVVEQKHLGELAASKYDNCGVEFGEPWEGFREDVGEKINGIKVSHRVTRK

SEQ ID NO: 79 - protein, 115 aa, Unknown
  Description of Unknown: uncultivated organism
  MG6-15 RuvC-III domain
NDTRYICRQVVGYLKQLGVTVTGTKGKSTDELRHSWGLNNILDLTGAGVKNRDDHRHHAVDAAVVAITTQKHLKDLASTKYSEKDRMFPQPWEGFREELEEKVNKIIVSHRATKR

SEQ ID NO: 80 - protein, 105 aa, Unknown
  Description of Unknown: uncultivated organism with predicted taxonomy: Planctomycetes
  MG6-16 RuvC-III domain
NDTRYINREVVKYLRQICSDVNGTRGKTTAELAYQWGFIKDREDHRHHSVDAAVIAVTGSEHLRQLGKSKYSDGTISFPPPWPHFREELAEKVKHINVSHRATKK

SEQ ID NO: 81 - protein, 115 aa, Unknown
  Description of Unknown: uncultivated organism with predicted taxonomy: Planctomycetes
  MG6-17 RuvC-III domain
NDTRYICKEVVKYLGQLGIVVKGSKGRITAELRHQWGLNSILDLAGEDMKNRDDHRHHAIDAVVVAVTKNEHLRRLAKSKYSQVESSFIEPWANFREELAEKVKHIDISHRAARR

SEQ ID NO: 82 - protein, 105 aa, Unknown
  Description of Unknown: uncultivated organism with predicted taxonomy: Planctomycetes bacterium
  MG6-18 RuvC-III domain
NDTRYICREVIKYLKYICKDVSGTRGKVTSELAYQWGFIKDRYDHRHHAIDAAVVAVTKPKHLNQLGKSKYSKEGIDFALPWPHFREELAEKVNQINVSHRARRK

SEQ ID NO: 83 - protein, 105 aa, Unknown
  Description of Unknown: uncultivated organism with predicted taxonomy: Planctomycetes bacterium RBG_13_60_9
  MG6-19 RuvC-III domain
NDTRYICREVVKYLKQICKNVSGTRGKVTSELAYQWGFVKDRNDHRHHAIDATVVAVTKNKHLRQLGESKYSKEGLVFVPPWPHFREELSNKVEHIDVSHEPVRK

SEQ ID NO: 84 - protein, 148 aa, Unknown
  Description of Unknown: uncultivated organism with predicted taxonomy: Flavobacteriales
  MG7-1 RuvC-III domain
RESQYIVKEAVKLLKEVCRDVTTTTGKITDLLKHQWGANDVFRNIQVPKYRKWGMTETIVDRKTGEVIERIIDWSKRKDHRHHALDAIIVACTRQSYIQQLNRLNVLYENDYESLKSYRKFELPWPSFHNDLISSLESLLVSFRNKRR

SEQ ID NO: 85 - protein, 143 aa, Unknown
  Description of Unknown: uncultivated organism with predicted taxonomy: Chitinophagales
  MG7-11 RuvC-III domain
RESQYIVKAAMKLLKQVCREVTPTAGKITDLLRHQWGLTDLLKEMQIPKYREWGLTETVDGQERIKDWSKRLDHRHHAVDALVVACTTRSFIQKLNTLNALYEDDDPTVRLSIRNIEEPWAGFRKDAKEATEAILVSFRNRRR

SEQ ID NO: 86 - protein, 148 aa, Unknown
  Description of Unknown: uncultivated organism with predicted taxonomy: Porphyromonas
  MG7-12 RuvC-III domain
RESQYIVKEAVKLLKEVCRDVTTTTGKITDLLKHQWGANDVFRNIQVPKYRKWGMTETIVDRKTGEVIERIIDWSKRKDHRHHALDAIIVACTRQSHIQQLNRLNVLYENDYESLKSYRKFELPWPSFHNDLISSLESLLVSFRNKRR

SEQ ID NO: 87 - protein, 163 aa, Unknown
  Description of Unknown: uncultivated organism with predicted taxonomy: Bacteroidales
  MG16-1 RuvC-III domain
RLSQYIATKAVEILQQGIRQVWTSGGGVTDFLRHQWGYDEILHTLNLPRYRQVEDLTEMVHYEHAGQEHDEERIKNWSKRIDHRHHAIDALTVALTRQSYIQRLNTLEASHEHMEKLVKEANTPYKEKKSLLEKWVALQPHFSVEEVTTQVDGILVSFRAGKR

SEQ ID NO: 88 - protein, 162 aa, Unknown
  Description of Unknown: uncultivated organism with predicted taxonomy: Bacteroidales
  MG16-232 RuvC-III domain
RQSQYISKKAVEILRSAIRDVYATSGSVTDFLRHIWGYDQILHNLNLPKYRDAELTEFVTYDHRGQEHQEERIKNWSKRIDHRHHAIDALTIALTRQGYIQRLNNLNASHDDIAEAVRKVNPLMEKKYSLLEKYIYIQPHFTVQEVTDKVDGILVSFRAGKK

SEQ ID NO: 89 - protein, 132 aa, Unknown
  Description of Unknown: uncultivated organism
  MG1-280 HNH domain
EKLKELNVEPSKTNVLKLRLLQEQQSQCPFTGEKLDEAQLQHYQIEPIVRVTEQSFTQTLGNKVLTTPDTCREKKQRTPYHWLAQALVWPEYVARVQRMYSGVQEEKKRLLTAPDAQELALKSKNGYIARVL

SEQ ID NO: 90 - protein, 192 aa, Unknown
  Description of Unknown: uncultivated organism
  MG2-4 HNH domain
DLNEYSGKNTKQRVALFQEKQRPFNDAAEAFAQALIDDAQYTPEQAQALATYANVRRFRLMREQNFECPFTGRHLSAEDIAKDRVDFEHIIPRSLKPTDSLDAMVITYRAVNQAKRNRTAMRFIKDMAGERLDADDAGWSYHTPQQFETAVNRMRPKGRLNTAAKRSQANRCDALLVEDYEPREADFLQRDL

SEQ ID NO: 91 - protein, 180 aa, Unknown
  Description of Unknown: uncultivated organism with predicted taxonomy: Verrucomicrobia
  MG2-90 HNH domain
DLREMAGLTAQDIAKEMNERLRSHAQVSKRLIAELPPGTRINASLIRKARIADDLDWKCPYTGKEFDPIDLITKNVDLDHVIPRSQRPSDSLDSLVVTFPEINKWKSNRTAWQFVHDEETKPVPKLPHLSIKQLKRYEGDVASFDKRGHLDDQHRKKRRIEKLLLKRYEEKAGGFTPGQL

SEQ ID NO: 92 - protein, 161 aa, Unknown
  Description of Unknown: uncultivated organism
  MG4-2 HNH domain
DLRKSAKQREQTWRRNRRNQQDREAAAEKLLQEARIANPSRADVEKVLLAEECGWHCPYTGHGFGMADLFGPHPHFDVEHIVPFSRSLDNSFLNKTICEARENRDRKRNHTPYEAYGADAERWDQIIARVQSFRGTASREKLRRFQQHEVEDLDGVAQREL

SEQ ID NO: 93 - protein, 163 aa, Unknown
  Description of Unknown: uncultivated organism
  MG4-1 HNH domain
DLKQSGQQREKASRKIRANQRAREKAAKKIIEETGIENPTREDILKVLLAEECNWICPYTRKNISIGSILGDNPQFDIEHIIPFDRSLDDSFLNKTLCDAVENRKVKKNRTPFEAYHGSARWDEIVVRLSDFKSDVKFQKLRRFKMTPEEVQKELEGFTARQL

SEQ ID NO: 94 - protein, 159 aa, Unknown
  Description of Unknown: uncultivated organism
  MG4-3 HNH domain
DLKQPRKEREKRSKRNRANQKLRQDAVKRIVTELKGVPANGMAIEKVLLAEECGWVCPFTGRRICMNTLLGPTPQFDIEHILPLSRSLDNTFVNKTLCYHEENRAVKGNRTPFEAYSASDDRWAEILERVGHFKSDLAREKLRRFKMEEIPEGFTDRLL

SEQ ID NO: 95 - protein, 157 aa, Unknown
  Description of Unknown: uncultivated organism
  MG4-4 HNH domain
DLKRGRKEREKIFKENVKRKKEREQIEKEIKSICKRDARPFEILKWRLWKECGGVCPYTGKSISERQLLGDESPVDVEHIIPLSRSLDDSFANKTLCWAEENREVKRNQTPFECYSAKPQWREILERVRRFKGDMRQEKLKRFLQEKIDEDPSKRML

SEQ ID NO: 96 - protein, 163 aa, Unknown; identical to SEQ ID NO: 93
  Description of Unknown: uncultivated organism
  MG4-1 HNH domain

SEQ ID NO: 97 - protein, 163 aa, Unknown
  Description of Unknown: uncultivated organism
  MG4-219 HNH domain
ELRQSPKQRESTWKSMRSREKERKAAAERIANEMGIENPTRTDILKVLLAEECNWRCPYTDKPISMASLLGDHPQFDIEHIVPFERCLDDSFLNKTLCDAEENRKVKKNRTPYEAYHGSPRWEAILKNVGAFNGTASYEKERRFQFTSDDVQEFISGFTSRQL

SEQ ID NO: 98 - protein, 159 aa, Unknown
  Description of Unknown: uncultivated organism
  MG4-220 HNH domain
DLKTPRTLRERRAKENRARQAVRGAAKQRLLEEAGIRQPSRADIEKVLLADECGWTCPYTGKGFDMARLVGPTATFDVEHILPFSRSLDDSYLNKTICDVHENRHVKGNRTPFEAYSGNVERWHEIIDRVRHFNGDAARIKLHRLQMEEIPAEFASRDL

SEQ ID NO: 99 - protein, 163 aa, Unknown
  Description of Unknown: uncultivated organism
  MG4-221 HNH domain
DLKQSGQQREKASRKIRANQRAREKAAKKIIEETGIENPTREDILKVLLAEECNWICPYTRKNISIGSILGDNPQFDIEHIIPFDRSLDDSFLNKTLCDAVENRKVKKNRTPYEAYHGSARWDEIVVRLSDFKSDVKFQKLRRFKMTPEEVQKELEGFTARQL

SEQ ID NO: 100 - protein, 166 aa, Unknown
  Description of Unknown: uncultivated organism
  MG4-222 HNH domain
DLKKSKKQRQAISENNRRNEKARIEAAKKIIAEAGIAGPRPDDIRRFLLAEECRWMCPYTGKSISVSSLFGPEPQFDIEHIIPFSQSMDNSFPNLTLCHVPENRAVKGNKAPWQAYHGDPERYEAILDRVRRFTGDRRTVAAKLKRFAMDDDGLEGFLEDFRNRQL

SEQ ID NO: 101 - protein, 165 aa, Unknown
  Description of Unknown: uncultivated organism
  MG4-223 HNH domain
DVKQPKRRRQERWKKMRRREEQRAAAKRRIFDECGITNPSRSDIEKILLADECSWICPYTGRAFGMADLFGPQPSIDIEHILPFSRTLDNSLVNKTLCDVHENRLRKQNRTPFEAYGAMAERYDEILGRVARFQIDADVRRAKLERFRRRELGGEVLDAFSERQL

SEQ ID NO: 102 - protein, 157 aa, Unknown
  Description of Unknown: uncultivated organism
  MG4-224 HNH domain
DLKRSREDRKELWKTFRRRQDNREKLRAEIERQTDLKNPSRSDIERVLLGEECGWICPYTGRSIRFASLFGDHPQFDIEHILPFSRCPDDSFANKTLCFQEENKMKSNRTPWEAYGPNPQRWEEILERVRRFQNPGKLKRFQVRSSEELAEFTSRQL

SEQ ID NO: 103 - protein, 163 aa, Unknown; identical to SEQ ID NO: 99
  Description of Unknown: uncultivated organism
  MG4-225 HNH domain

SEQ ID NO: 104 - protein, 163 aa, Unknown
  Description of Unknown: uncultivated organism
  MG4-226 HNH domain
DLKQSPKQREDSWKRARANERDRKAAAQRILEETGIDNPSRDDILKVLLADECEWHCPYTGKQIHMNALVGDSPQFDIEHIIPFERCLDNSYLNKTLCHADENRHVKHSRTPYEAYHDTARWDEMIVRVEKFRGNGAYKKLRRFKMTPEDVRSLMDDFTTRQL

SEQ ID NO: 105 - protein, 163 aa, Unknown; identical to SEQ ID NO: 93
  Description of Unknown: uncultivated organism with predicted taxonomy: candidate division Zixibacteria
  MG4-227 HNH domain

SEQ ID NO: 106 - protein, 163 aa, Unknown
  Description of Unknown: uncultivated organism
  MG4-228 HNH domain
SLRQTAKQRENTTKKNNTLRREREQIRERIEKEIGIKDPSRTDIQKVQLAEECNWECPYTGKHISMASLLGDHPQFDIEHIIPFERCLDDSFMNKTLCGAEENRKVKKGRTPYEAYHGTDKWDDIIARIEKFHGDAARPKLRRFELDEKDVDGLLNNFTERQM

SEQ ID NO: 107 - protein, 163 aa, Unknown; identical to SEQ ID NO: 104
  Description of Unknown: uncultivated organism with predicted taxonomy: Kiritimatiella glycovorans
  MG4-229 HNH domain

SEQ ID NO: 108 - protein, 163 aa, Unknown; identical to SEQ ID NO: 93
  Description of Unknown: uncultivated organism with predicted taxonomy: candidate division Zixibacteria
  MG4-230 HNH domain

SEQ ID NO: 109 - protein, 159 aa, Unknown
  Description of Unknown: uncultivated organism with predicted taxonomy: Planctomycetes bacterium
  MG4-231 HNH domain
DMKRSRRQREELTRDIASRTKERIRIAEKITREAKIASPKRSDIVKALLWQECGGVCPFTGRSIDFASLFGPNPQFDVEHIIPFSRSLDNGFLNKTLCHHDENRSRKGNRTPYEAYSSDPDNYDAILERVRRFQGGAARAKLRRFEMTELPDDWISRHL

SEQ ID NO: 110 - protein, 160 aa, Unknown
  Description of Unknown: uncultivated organism with predicted taxonomy: Acidobacteria bacterium
  MG4-232 HNH domain
DLKRSRKQREQAHNTMKANRKRREAAVKRILAESNIGDPRSDDIEKVLLAEECQWRCPYTGKSICMGSLLGPNPQFDVEHIIPLSRSLDNRFTNKTLCYHEENRQRKRKLTPYEAYSHDAERYGDILQRVRKFDGPAARAKLRRFMMAELPADEFTARQL

SEQ ID NO: 111 - protein, 163 aa, Unknown; identical to SEQ ID NO: 93
  Description of Unknown: uncultivated organism with predicted taxonomy: candidate division Zixibacteria
  MG4-233 HNH domain

SEQ ID NO: 112 - protein, 160 aa, Unknown
  Description of Unknown: uncultivated organism with predicted taxonomy: Bryobacter aggregatus
  MG4-234 HNH domain
DLKKTRDQRKKASLNNRQNQKLREDAAQKILDQANIQNPSRDDILKVLLADECNWECPYTGRGISMKDLFGDNPQFDIEHMIPFARSMDNSYVNVTLCHHETNRNVKKNYTPFEAFGSSPEWDRIVNRVKKFNGRLAKVKLQRFTMEKLEDLDSFANRQL

SEQ ID NO: 113 - protein, 157 aa, Unknown; identical to SEQ ID NO: 102
  Description of Unknown: uncultivated organism
  MG4-235 HNH domain

SEQ ID NO: 114 - protein, 163 aa, Unknown; identical to SEQ ID NO: 93
  Description of Unknown: uncultivated organism
  MG4-236 HNH domain

SEQ ID NO: 115 - protein, 161 aa, Unknown
  Description of Unknown: uncultivated organism
  MG4-237 HNH domain
DIKRNRKERKKMSKNNRERETERKKAVSDILEQMDIQNPKRMDVEKVLLAEECDWHCPYCNATLGGMAGLFSGSVHIEHIIPRHRSLDNSFINKTLSCSKCNSQKGDRTPYEAFGASPKWEEILQRVRNFKSGIAREKLKRFKMDDDELDDFLSDFSHRQL

SEQ ID NO: 116 - protein, 154 aa, Unknown
  Description of Unknown: uncultivated organism with predicted taxonomy: Balneolales
  MG6-3 HNH domain
DLKAGYERRQKMTKKMRELEKKNDKAYKALQKEPFNIQYPGYNDIIWFNLWEECDKTCPYTGKTIPAEAFNSGEFQIEHILPFSRSLDNSYANKTLCEADFNRKKGNRTPWECVEAGIMEEDTMLQRIRNLPWNKRNKFTQKEIDEDKFLNRQL

SEQ ID NO: 117 - protein, 157 aa, Unknown
  Description of Unknown: uncultivated organism with predicted taxonomy: Planctomycetes
  MG6-1 HNH domain
DVRGGARERRELHFKMLDNEKRNEEIRKRLREIGISSPKRDDIIKYNLWEECGHICPYTGKHISQTALFGENPEFQIEHILPYDRSLDDSFMNKTLCHVHENIHVKRNQTPYETYGHNPGKFDELKQRVNKTAMTYWKKQKFWQKEINTDKIIEREL

SEQ ID NO: 118 - protein, 161 aa, Unknown
  Description of Unknown: uncultivated organism
  MG6-4 HNH domain
ETKHSIKLRNKIVGKQNRNEKLRNDIRDRLRKEFGVSNPNSSQIMAMKLWEEQGGLCIYSGRAITSKHLQERICGSRNLDIDHILPYSRTLDNGYDNKILCFRDVNAQKDNRTPHEWLEGAEYQDMLQRVQACKDTGMSFRKMKRFCQREIELNECIRRHL

SEQ ID NO: 119 - protein, 156 aa, Unknown
  Description of Unknown: uncultivated organism with predicted taxonomy: Planctomycetes
  MG6-5 HNH domain
EVKGSKRERDEIHLKQYKNERINEEARKTLIDDFKIPNPSRDDIIKYKLWVECNKVCPYTGKSISQHQLFGPNPEFQIEHIIPYSRCLDDSYMNKTLCFVDENKEKGNETPYEYYSEKIPKQYEQILQRIRTLPYPKRRRFSQQEVKLDNFIERQL

SEQ ID NO: 120 - protein, 157 aa, Unknown
  Description of Unknown: uncultivated organism with predicted taxonomy: Planctomycetes
  MG6-2 HNH domain
DVRGSARERRELHFKMLENEKRNEETRKRLREMGISAPKRDDVIKYNLWEECGHICPYTGKHISQVALFGDNPEFQIEHILPYNRSLDDSFINKTLCHVHENIHVKRNQTPYETYGHNPEKFEELKQRINRTSMSYWKRQKFWQKEIKTDKIIEREL

SEQ ID NO: 121 - protein, 155 aa, Unknown
  Description of Unknown: uncultivated organism with predicted taxonomy: Planctomycetes
  MG6-6 HNH domain
DVKGSLKEREEIQWKMRKNEKRNEAARTRLIQDMDIRNPSRDDVIKYKLWEECGKRCPYTGKVISITDLFGSNPVFQVEHILPYSRSLDDSYMNKTLCCVNENRIKGNKTPYEFYSGDEEKYEEVKQQIKVLPWPKRKKFLQKEINLDECIQREM

SEQ ID NO: 122 - protein, 155 aa, Unknown
  Description of Unknown: uncultivated organism with predicted taxonomy: Planctomycetes
  MG6-14 HNH domain
DVKGSAKERDEIRLKQWKNEQENKKAEEELKLMGIRNPSFNDRLKYKLWEECGKECPYSGKAISQHQLFGEQPDVQIEHIFPYSRSLDDSYMNKTLCYVNENRLKGNETPYEYYAHAKPEQWEGILQRIKRLPYAKRRRFWQKEVVLDKFIERQL

SEQ ID NO: 123 - protein, 154 aa, Unknown
  Description of Unknown: uncultivated organism
  MG6-15 HNH domain
DMKGSLQERQEQHFKMLENEKINANARKELIENIGILKPSREDIIKYKLWQECARLCPFTGKPISQNALFGPEPQFQIEHILPYSRSLDDGYMNKTLCWVEENRLKGNQTPFEFYNGTENFDLILKRIEVLPYPKRKRFWQKEIELDKCIQREL

SEQ ID NO: 124 - protein, 158 aa, Unknown
  Description of Unknown: uncultivated organism with predicted taxonomy: Planctomycetes
  MG6-16 HNH domain
DVRGNARQRKEIHFKMLDNKRRNEQTRKRLMEDMVIANPSRDDIIKYNLWIECGKVCPYTGKTISQEALFGPNPEFQIEHILPYDRSLDDSYMNKTLCEVYENIHVKKKQTPYETYSGDTERFEQLKQRVNRTAMPYWKKQKFWQKEIDTDKIISREL

SEQ ID NO: 125 - protein, 155 aa, Unknown
  Description of Unknown: uncultivated organism with predicted taxonomy: Planctomycetes
  MG6-17 HNH domain
DVKGNRREREEIHYKIQKKKKRNEEARTKLMQDMNILNPSRDDIIKYKLWEECATVCPYTGKSIAQHQLFSEHPEFQVEHILPYSRSLDDSYMNKTLCCVNENRIKGNQTPYEFYSGDEEKYEQVKQRIKVLPWPKRRKFLQKEINLDECINREL

SEQ ID NO: 126 - protein, 157 aa, Unknown
  Description of Unknown: uncultivated organism with predicted taxonomy: Planctomycetes bacterium
  MG6-18 HNH domain
DVRGSTRERRELHFKMLDNEKRNEETRKRLREMGIEEPKRDDIIKYNLWEECGHICPYTGKHISQTALFGENPEFQIEHILPYDRSLDDSFMNKTLCHAHENIHVKRNHTPYETYSHNPDKFDELKQRVNKTAMPYWKRQKFWQKEINTDKIIEREL

SEQ ID NO: 127 - protein, 158 aa, Unknown
  Description of Unknown: uncultivated organism with predicted taxonomy: Planctomycetes bacterium RBG_13_60_9
  MG6-19 HNH domain
DVYGSRRQREKLHWKMRENEKINEYARKRLIEDIEINRPTREDVIKYKLWEECGKTCPYTGRHISQTALFGPNPEFQIEHILPYNRSLDDSFMNKTLCQVHENIHVKRDQTPYEAYSNNPEKFEELKQRVNRTAMPYWKKKKFWQKDINTDEIISREL

SEQ ID NO: 128 - protein, 172 aa, Unknown
  Description of Unknown: uncultivated organism with predicted taxonomy: Flavobacteriales
  MG7-1 HNH domain
ELKSGAKERRRAELGMARAAKDNDRIRELLQTEFGIPYPGRRDILRYRFWEEQDMRCVYSGDVIPRNKLFVGEEYELDHIIPRARLFNDSNSNLVLVKSSENKDKSDMTAADYMKSKGEKAFEEYLVRVKNLYDKGAKKKAGERGSGINKGKRNFLIMKKEEIPQDFIERQL

SEQ ID NO: 129 - protein, 173 aa, Unknown
  Description of Unknown: uncultivated organism with predicted taxonomy: Chitinophagales
  MG7-11 HNH domain
DLKSGAKERKRKEQAINKARKENEEIRDILSKEFGIKRPSRQDIFRHRCWIEQKHQCLYSGDPIPRSKLFSDAEYDLDHIIPRARMYDDSFANRVLVKTSENRTKSDATAFDFMSGKGDSKLNEYKVRVKSLYDEGTGRKSGELQKPGIGRAKRDFLLMPANEIPQDFIDRQL

SEQ ID NO: 130 - protein, 172 aa, Unknown; identical to SEQ ID NO: 128
  Description of Unknown: uncultivated organism with predicted taxonomy: Porphyromonas
  MG7-12 HNH domain

SEQ ID NO: 131 - protein, 160 aa, Unknown
  Description of Unknown: uncultivated organism with predicted taxonomy: Bacteroidales
  MG16-1 HNH domain
ELKQSREERKDAFDRNNKNEKRNKEISALISEQGIRPSRSRIQKYKMWEESEHRCMYCGKVVNLSEFLNGADVEIEHIIPRSILFDDSFSNKVCACRDCNREKDNMTAMDYMASKPEGEFEAYKQRVDEAFNAHRISKTKRDHLLWRRADIPQDFIDRQL

SEQ ID NO: 132 - protein, 160 aa, Unknown
  Description of Unknown: uncultivated organism with predicted taxonomy: Bacteroidales
  MG16-232 HNH domain
ELKQSKDERAQTTERINKNERENKAIEERIREHGIRPSRARIQKYKMWEESQHQCFYCGKSISAAEFLSGADVEVEHIIPKSILFDDSFSNKVCACRDCNHTKDNLTARDFMETRGQVELDAYLARVNTAFEEGRISKTKRDHLLWHKEEIPQDFIDRQL

SEQ ID NO: 133 - RNA, 102 nt, Artificial Sequence
  Description of Artificial Sequence: Synthetic polynucleotide
  MG2-4 sgRNA
  modified_base (1)..(22): a, c, u, g, unknown or other
nnnnnnnnnnnnnnnnnnnnnngcuuugucuugaugaaaaucaagaucaaaguaaacggccccgcuccggacccugccuggcacuccggaugcgcuaggguu

SEQ ID NO: 134 - RNA, 127 nt, Artificial Sequence
  Description of Artificial Sequence: Synthetic polynucleotide
  MG4-2 sgRNA
  modified_base (1)..(22): a, c, u, g, unknown or other
nnnnnnnnnnnnnnnnnnnnnngcugugguuugauggguucgcuccucaaaucauaguaaggggcaauugccucgcgggcucugcccuacggggcaccccucgagcgccucccaguggggcgcuuuu

SEQ ID NO: 135 - RNA, 127 nt, Artificial Sequence
  Description of Artificial Sequence: Synthetic polynucleotide
  MG6-3 sgRNA
  modified_base (1)..(22): a, c, u, g, unknown or other
nnnnnnnnnnnnnnnnnnnnnnguugugguuugaacucugaaaagagucuuaucacaacaaagagaucuuagacucugcaggcacugcucaaaugaguauccuuagcccucugcggagggcuauuuu

SEQ ID NO: 136 - RNA, 109 nt, Artificial Sequence
  Description of Artificial Sequence: Synthetic polynucleotide
  MG7-1 sgRNA
  modified_base (1)..(22): a, c, u, g, unknown or other
nnnnnnnnnnnnnnnnnnnnnnguugugaauggcuuucagaaaugaaguuauucacaauaaggauuauuccguugugaaaacauuuaaagcggcccucgggucgcuuuu

SEQ ID NO: 137 - RNA, 100 nt, Artificial Sequence
  Description of Artificial Sequence: Synthetic polynucleotide
  MG16-1 sgRNA
  modified_base (1)..(22): a, c, u, g, unknown or other
nnnnnnnnnnnnnnnnnnnnnnguuguguauggaaacauacacaauaaggauuauuccguugugaaaacauucagggugggacgcaagucucgcccuuuu

SEQ ID NO: 138 - RNA, 100 nt, Unknown
  Description of Unknown: uncultivated organism
  MG2-4 tracrRNA
uuugaaucaagaucaaaguaaacggccccgcuccggacccugccuggcacuccggaugcgcuaggguuuuuuauuaaaccggguaccaucccgguuuuuu

SEQ ID NO: 139 - RNA, 106 nt, Unknown
  Description of Unknown: uncultivated organism
  MG4-2 tracrRNA
aguguauccgaacggcgguugcuccucaaaucauaguaaggggcaauugccucgcgggcucugcccuacggggcaccccucgagcgccucccaguggggcgcuuuu

SEQ ID NO: 140 - RNA, 103 nt, Unknown
  Description of Unknown: uncultivated organism
  MG4-1 tracrRNA
auguucucaaucgacgguuguuucaauuuccaguaagagacaaucgucucgaagguuuuggcucuacggggccgccgacgcccguccagaacgggcgucuuuu

SEQ ID NO: 141 - RNA, 106 nt, Unknown
  Description of Unknown: uncultivated organism
  MG4-3 tracrRNA
aguguaucugagcgacguuuguccgccaaucauaguaaguggacuuucguccgcgaaaggugagcuccacggagcauccuuugaacgccucccugcggggcguuuu

SEQ ID NO: 142 - RNA, 84 nt, Unknown
  Description of Unknown: uncultivated organism
  MG4-4 tracrRNA
uauaccagagcuaaaauuccuuguuuguuuuaguaagacuuuuucuaaaacauuagguuuuuugaguugucgaggcuccguuuu

SEQ ID NO: 143 - RNA, 103 nt, Unknown; identical to SEQ ID NO: 140
  Description of Unknown: uncultivated organism
  MG4-1 tracrRNA

SEQ ID NO: 144 - RNA, 97 nt, Unknown
  Description of Unknown: uncultivated organism with predicted taxonomy: Balneolales
  MG6-3 tracrRNA
aaucaucucgaaaagagucuuaucacaacaaagagaucuuagacucugcaggcacugcucaaaugaguauccuuagcccucugcggagggcuauuuu

SEQ ID NO: 145 - RNA, 85 nt, Unknown
  Description of Unknown: uncultivated organism
  MG6-4 tracrRNA
gguguggucgaccuguuuuugugaccaauccacaacggugagaacacccgucaaaaaaaggcgggggguguggucgaccuguuuu

SEQ ID NO: 146 - RNA, 114 nt, Unknown
  Description of Unknown: uncultivated organism with predicted taxonomy: Planctomycetes
  MG6-5 tracrRNA
auuguaacugaucugugucugcgugcuugucauaacaaguaagauuucgaaagaaaucucgcaggcacugccccauugggcguuugcaaaaaugcccaaugggguaaaccuuuu

SEQ ID NO: 147 - RNA, 72 nt, Unknown
  Description of Unknown: uncultivated organism with predicted taxonomy: Flavobacteriales
  MG7-1 tracrRNA
acgauuugaaguuauucacaauaaggauuauuccguugugaaaacauuuaaagcggcccucgggucgcuuuu

SEQ ID NO: 148 - RNA, 76 nt, Unknown
  Description of Unknown: uncultivated organism with predicted taxonomy: Bacteroidales
  MG16-1 tracrRNA
uuauuugaaugacauacacaauaaggauuauuccguugugaaaacauucagggugggacgcaagucucgcccuuuu

SEQ ID NO: 149 - DNA, 4 bp, Artificial Sequence
  Description of Artificial Sequence: Synthetic oligonucleotide
  MG2-4 single guide 3' PAM
  modified_base (1)..(1): a, c, t, g, unknown or other
nagg

SEQ ID NO: 150 - DNA, 6 bp, Artificial Sequence
  Description of Artificial Sequence: Synthetic oligonucleotide
  MG4-2 single guide 3' PAM
  modified_base (1)..(1): a, c, t, g, unknown or other
  modified_base (3)..(3): a, c, t, g, unknown or other
ngnccc

SEQ ID NO: 151 - DNA, 5 bp, Artificial Sequence
  Description of Artificial Sequence: Synthetic oligonucleotide
  MG6-3 single guide 3' PAM
  modified_base (1)..(1): a, c, t, g, unknown or other
nrrta

SEQ ID NO: 152 - DNA, 6 bp, Artificial Sequence
  Description of Artificial Sequence: Synthetic oligonucleotide
  MG7-1 single guide 3' PAM
  modified_base (1)..(1): a, c, t, g, unknown or other
  modified_base (4)..(4): a, c, t, g, unknown or other
nrrncg

SEQ ID NO: 153 - DNA, 6 bp, Artificial Sequence
  Description of Artificial Sequence: Synthetic oligonucleotide
  MG16-1 single guide 3' PAM
  modified_base (1)..(1): a, c, t, g, unknown or other
  modified_base (4)..(4): a, c, t, g, unknown or other
nrrncc

SEQ ID NO: 154 - DNA, 4 bp, Artificial Sequence
  Description of Artificial Sequence: Synthetic oligonucleotide
  MG2-4 dual guide 3' PAM
  modified_base (1)..(1): a, c, t, g, unknown or other
nagg

SEQ ID NO: 155 - DNA, 6 bp, Artificial Sequence
  Description of Artificial Sequence: Synthetic oligonucleotide
  MG4-2 dual guide 3' PAM
  modified_base (1)..(1): a, c, t, g, unknown or other
  modified_base (3)..(3): a, c, t, g, unknown or other
ngnccc

SEQ ID NO: 156 - DNA, 6 bp, Artificial Sequence
  Description of Artificial Sequence: Synthetic oligonucleotide
  MG6-3 dual guide 3' PAM
  modified_base (1)..(1): a, c, t, g, unknown or other
nrrtaa

SEQ ID NO: 157 - DNA, 6 bp, Artificial Sequence
  Description of Artificial Sequence: Synthetic oligonucleotide
  MG7-1 dual guide 3' PAM
  modified_base (1)..(1): a, c, t, g, unknown or other
  modified_base (4)..(4): a, c, t, g, unknown or other
nrrncg

SEQ ID NO: 158 - DNA, 6 bp, Artificial Sequence
  Description of Artificial Sequence: Synthetic oligonucleotide
  MG16-1 dual guide 3' PAM
  modified_base (1)..(1): a, c, t, g, unknown or other
  modified_base (4)..(4): a, c, t, g, unknown or other
nrrncc

SEQ ID NO: 159 - RNA, 28 nt, Artificial Sequence
  Description of Artificial Sequence: Synthetic oligonucleotide
  test target sequence
cgugagccaccacgucgcaagccucgac

SEQ ID NO: 160 - RNA, 22 nt, Artificial Sequence
  Description of Artificial Sequence: Synthetic oligonucleotide
  MG7-1 guide sequence 1 for targeting Albumin
ugcaaaguaacuuagagugacu

SEQ ID NO: 161 - RNA, 22 nt, Artificial Sequence
  Description of Artificial Sequence: Synthetic oligonucleotide
  MG7-1 guide sequence 2 for targeting Albumin
cgcaaaagaaaauuacagucac

SEQ ID NO: 162 - RNA, 22 nt, Artificial Sequence
  Description of Artificial Sequence: Synthetic oligonucleotide
  MG7-1 guide sequence 3 for targeting Albumin
aauuacagucacuaaacaauuc

SEQ ID NO: 163 - RNA, 22 nt, Artificial Sequence
  Description of Artificial Sequence: Synthetic oligonucleotide
  MG7-1 guide sequence 4 for targeting Albumin
uuuauuaauaagauaaccuugu

SEQ ID NO: 164 - RNA, 22 nt, Artificial Sequence
  Description of Artificial Sequence: Synthetic oligonucleotide
  MG7-1 guide sequence 5 for targeting Albumin
cgcaaaagaaaauuacagucac

SEQ ID NO: 165 - RNA, 22 nt, Artificial Sequence
  Description of Artificial Sequence: Synthetic oligonucleotide
  MG7-1 guide sequence 6 for targeting VEGFA
ucagaaauaggggguccaggag

SEQ ID NO: 166 - RNA, 22 nt, Artificial Sequence
  Description of Artificial Sequence: Synthetic oligonucleotide
  MG7-1 guide sequence 7 for targeting VEGFA
cuuuagccagagccggggugug

SEQ ID NO: 167 - RNA, 22 nt, Artificial Sequence
  Description of Artificial Sequence: Synthetic oligonucleotide
  MG7-1 guide sequence 8 for targeting VEGFA
acggcagucacuagggggcgcu

SEQ ID NO: 168 - RNA, 22 nt, Artificial Sequence
  Description of Artificial Sequence: Synthetic oligonucleotide
  MG7-1 guide sequence 9 for targeting VEGFA
aaacuccccccacccccuuucc

SEQ ID NO: 169 - RNA, 22 nt, Artificial Sequence
  Description of Artificial Sequence: Synthetic oligonucleotide
  MG7-1 guide sequence 10 for targeting VEGFA
uuuccaaagcccauucccucuu

SEQ ID NO: 170 - DNA, 3603 bp, Artificial Sequence
  Description of Artificial Sequence: Synthetic polynucleotide
  MG2-4 sequence codon optimized for E. coli
atgaacagcacacgttctactccgctggtattgtcgtttgacattgggtacgcgagtatcggctggtcggtagccgaggtagtagacccggcaaacaatctgcaagcgggcgtggtgacattcccaagtgacgacgtgttgaactcagaacgcgcaggccaccgtcgtgctcgccgcaatattgccgcgcgccgtaaccgcgtccaacgtctgaaattggcgagcgtaggagctggatttgtaactgctgaagaaattgagaccctggatcgcatggaacgtaagtcagctcccgagtggcgtcactgtccgtggtttctggcggcgcgtgtacttggagagagcccggagtcaacacttacgggtctgcaacttttccatgttcttcgctggtatgcacataaccgcggatacgcgccgccgagctggggcttatttgatgaggccgatggggaacaagaggaagactttgaaaaggtacgtaatgcggagaaagctatgcacgaatttggcgcagatacgatggcccagacatggtgcgcactgttggatgccgatccgacggccggtcgttggccggaaccgcgtcactgggccaaaggtgaaaacatggcgttcccacgcgaacgtgtccaggcagaggttacacgtctcctggttgcgcatgttggtaaattacctggtgttacctctgactttgtccgttgtttaattgatgactgggaacaccatccaaagatccgttcctggctgcaaggcgcagacccacgtactggcaaactgcgcgactacgcacttccgaagcgctatgagggtggcttattgtttggtcaacacattccgcgctttgataataagattattccgtggtgcccttttacactgaaagaggacacaaacagcggcaaaattagcgggcgtaatgtgcctaagaaacattcgcgtgcattcttggattttaaggtggcaatgcgtctgaatgatctggctctgagtgagcttggggaatcgggtggtcgtctgtcggcaggacaacgtatgactctgtttaagcgtattgaaggttatggtgacgtgacagtccgccagtttgctgatttagtggcggaagtttgtgcaattccgaaacctgacttgaccacgcgcattccggaacgtgagggttcagaccgtcctttcgagctgcgtcctgaacgtaaagcactgattgcgatcttaacaggtggccgcagtttaccaagttggcctctgattcatagtatttgggattgctttgaagatgcagaggctgtcttgcgtccagttttccatggtaagccgacatcgtgggcagacctgattgaacaagccaaagcgccggacgtactgttggagcgcttagaggaattgttccgtctgggcaagggcaagccgagtcgtagcaagaaggcccagcccccgccagactttgaagtacttcttcgctgtaagattactattacgaaagcccatggtcgtgcacgctattgcagcgacaagcttcgtgcagccacggatgaagcgctgggtggccttgacccacgtcgtgcaccaacgactgagacatcggatgatgcgggttgtctgtatctcaatgaacgtcagcgtgatctgcaggatcgtttaccgttgtcgaaattgacaaataaccatctggttcgccatcgtttgttgatctttcgtcgtcttctgcaagatctggttaacacgtacgcgaatggagaccgcgagcgtattgatgcaattgttgtggaagtggcgcgtgatttgaatgaatacagtggaaagaatactaagcaacgcgttgctctctttcaagaaaagcaacgcccgtttaatgacgcggcggaagcattcgcgcaggcgctgattgatgatgcgcagtatacacccgagcaagcgcaagcgctggccacttacgccaatgtccgtcgtttccgtctgatgcgtgaacagaattttgaatgcccttttaccggacgccatttaagtgcagaggatattgcgaaagaccgcgttgattttgagcatattattccacgttctcttaaaccaacagacagcctggatgctatggtgatcacatatcgtgcagtgaatcaggctaagcgtaatcgcacggctatgcgttttattaaagatatggcaggcgaacgcttagacgcagatgatgcagggtggtcgtaccatacgccgcagcagtttgaaactgccgtcaaccgtatgcgcccgaagggccgcctcaatactgcagcgaaacgttctcaggcgaaccgttgcgacgccttattggtagaggattatgagccgcgtgaggcggactttctgcaacgtgatctgactcagactggttacctcatgaagtatgcagtgggagaggcgcgcaaattctttcgctccgcgccgcgtcaacctcgttttattcatctggaaggtcgtgtgacgaccttcttcaagaaggcgtggcgtttgacggagaccctggcgcccattagtccgttattcttacgtgagtatgcggacccacgcacgggccgctggcaatcgaccgtccgtccgaaggcagagttacgtcgctttacgcagcttcaccacgccctggatgcgttaaccttaggtttagccacagcactggtgcctgggatcgagcgtaaagaactgcgtcgtgcgctgtcgctgcgtcaggcgaagggtgatgatgcaacgctgttacgcagcgatcccaagttgggcgaagcattgcgttggcgtacggaagatcgctttgaagcggcgcccttaagcggtaagctggagagtgctgtgcgtcgtgccctggcagagggccgtgtggtacagcatgtcccagcaaagcgtcaaggaatgaaggtagattcaaatttctttggttttgttgagtttgatgagaccggccgtttacgcgtacgtcagaagatgcgttcccccaccacacgtcgtcgtgagattaagactaccgttaagaatggtaagaatttacatacgttatctcatcttagtttagacccaaagagctggttgggagccccggatcacccgttgcgtcgtaaacagttagaacatgggctgcgtacggaaaatgacttggcaaatccaaagttaggtaatattcgcggaatgctgccaattcgtgagaattggggtattgcgcttattaccaaagatgggtcgccacgtttagacgttattccgtatattaatgtgcatcagtggctggaagtcctggcgcttgagaatggcggtggcagtcctgtggtgctccgtaagggccatttggttggatttgacgcggagaaatgtccagaggagtactgtggggcgtggatgctgctgggagtgaaggatggtcgcagcggaaccaccttggagctgatccgtccgtggatggttgcgccgcgtaagggcggtactaaagagagctcggcaaaacaggccattaagccggcgtcgggctatagtgaaaaggaagggaaagccagcggcgtgttcttgcaacgctctgcagacgtgtttctgaagcttggtcttcgcccactggatcatgaccttacgggcattgcagccttt

SEQ ID NO: 171 - DNA, 3114 bp, Artificial Sequence
  Description of Artificial Sequence: Synthetic polynucleotide
  MG4-1 sequence codon optimized for E. coli
atggataaggtgaaagcaaatagtacgacgttgggaattgacctcgggcccaacagtatcggttgggcgctcttccgtaacgacaagagcaacaagcctggcggcttaatcgcgactggcactcgcgtcttccatgcaggcttagatgacttagagatggacggccgtggaaagagccgtaactcgaagcgccgtgaagctcgcagtcgtcgccgtcttctcgaacgtcgtcgtcgtcgtatgacgaaccttgcaatcttcttacgcaatatcggtcttttcccggaaattaagatcgaggacagcgggatccgccacgagttcctgaaggagtacgacctggctaacgaccaaccgtataccttgcgcgcaaagggtttagaccacaagttggagccctacgaacttggtcgtgcactgtaccaccacggtcaacgccgcggtttcttgtcgaatcgcaagtccgcgccgaaggatacaaaagaggaaaagggaattaagaaggagatcggtgagttagccggcgacatcatcaagaagaaggcgcgtaccttaggtgaatacttctccatgactgagcccatttcagaaccgatccgcggtcgctatacaagccgtaaaatgtacattgacgagtttgagcagatttggtctaagcaatccgagttttaccctgatatcctcaacgaggagaaccgtaagaaaatcttcaagatcatctttcatcaacgtcctctgaagagccagaagcatctgatcggcgagtgtgagctcgagccgaaccgttttcgtgcaccatggggtattctcaaagcgcaacgcttccgttacttacagttactgtgcaaccttactgtggcggacgatgcgcgcagtacccagcgccccatcaccgacgaggaattcgagcttcttcaacaaaatcttgaactgcatggggacattaccttcgcacaagcacgccgtcttctgggtctcggacgttttgcgaagtttaaccttgaattaggtggtgaaaagcgtatcattggaaacaagatctcggcgaagctcgccaagattttcggagaggagatttggtcggggttcaccgaggacaagcagaacaagatcgccgaagatctccgctgtatcaataacgaggacatcctgaagagtcgcggtatcaatgtgtggggtcttaatgaggaaggtgcggagaaattatcgcaaatcaagctcgaggacggatactgtcgtttctcacgtcaagccatcgatcgtcttttgccgatgttggagcgccgtgtctcacttcaaacggcgatccgcgagctctacccggagcgttgggacaatgagcaagatcgccttgattttcttccaccagtgagcgagtcgggcttaccagcactgcgtaacccaattgttgagcgtacgttaaccgagttacgtaaagtggtcaattcgatcatcgcccaatacggtaagcctaacatgatccgtattgagctcgctcgcgatctcaaacagtccggtcaacaacgtgagaaggcatcgcgcaagattcgtgccaaccagcgtgcgcgcgaaaaggccgcaaagaaaattattgaggagacgggaatcgagaatccaacgcgcgaggacattttgaaggtgctgttagccgaggagtgtaactggatttgtccctatacccgcaagaacatctctattggtagtattttaggggacaacccacaattcgatatcgagcatattattccattcgatcgctcgctggatgactctttccttaataagaccctgtgtgatgctgtagagaatcgcaaggtcaagaagaatcgcacaccatttgaagcctatcacggcagcgctcgctgggacgaaattgtagtacgcttatcagatttcaaatccgatgtgaagttccaaaagcttcgtcgtttcaagatgacaccggaagaggtacagaaggagcttgaggggtttacagcccgccaattgaatgacacgcgttgggcgtcacgctgggcgaaacagtacctcggcttattgtacagcggaatcaagggcgacggtatcgacgccgagggaaaacgtaaggttcaagcagtcggcgggcccgtcacggctcacttgcgtaatcaatggaatttgaacagcattctgagtgactcggacatcaaggggcgcgacgaccatcgtcatcatgcggttgacgcagttgtcgttggcctgaccgacgcaggctccatcaagaaactttccggcgctgcagtttcgggatacagcggtcgtaagaaattcaaggaaatcgagccaccgtgggatggcttccttgaggaagtacgtaacaagattcaatcagtcaccacatcgcatcgcctcagccgtcgtgtgcgcggagccatgcaccaagagtcgttttacggtaagccgcgtaaggataaggacggtaagacctacattcatatccgtaaacccctcgagtcgttgagcaagaaggaactgaagtacattgtcgaccccgtcatttctgacgcgattaagacgaagctcaaagaattgaaacaggatgacccaaagaaggcgtttgccgacattgaaaatcacccagtacttagtggaaatcacggtaagaaaactccaattcaccgtgttcgcgtacgcatgaatctttcggaaacgtttcccgttgggaagaatcatcgtacacgccatgttcttagcgactcaaaccaccatatcgagatcgtcgaaagcactgatcccgagaatgaaaagatcaattgggaaggactggtggtgagccttttcgaggcttatcaacgtaagaagaacggcacgcctatcgtacgccgcgaattcggcgttaataagaagtttctgttttcacttgccaatggcgacattattgaacttgacaatgccgaaggtactgcacgtggtttattcattgtacgtactgtgcgcaagagtaagcaaatcaagtttgttcccattaacgacgcccgcgcctataagcaagacatgtggggcggcctgaccgccaagccagactctcttcgtcgtcgccgctgccgtaagttgaccgtaacaccgttgggcgacgtccgcacggcaaatgac

SEQ ID NO: 172 - DNA, 3129 bp, Artificial Sequence
  Description of Artificial Sequence: Synthetic polynucleotide
  MG4-2 sequence codon optimized for E. coli
atgcttcgtgagcccggtaatagcgttaaatccaagattatgggtcaacaagccaaacgccgctcctacgttttgggcttagatatcggtacgcatagcgtaggttgggccttgttgaaatttcgcgatggacgcccatgtggtgtggaacgtgcaggcgttcgtatctttgagccaggtgtggaagaagtcgcgtttgaacgtggtcgcgcggaaccgcctgggcaaaagcgtcgccaagcccgtgcgttacgtcgtcaaaccgaacgtcgtgcgcgtcgtaaagcgaagcttttacatattcttcaacgtgcggggctgttaccaaaaggtgaggcagatgaaatccttccggcgctggatcgtgacattttagcccgtcattcggcagcatggccgggagcacgtgatgcacttccttattggctccgtagtggcgctttagatcatcgccttgaacctcatgaatttgggcgtgcactttatcatctcggtcaacgtcgcgggttcttgagtaatcgtcgtgccccgatgcgtaagaatgaagaagatggaaaagtgaaagcaggaattagcacgcttaaagaacaaatggagaaagcaggggcacgtacgttaggcgaattctttgcaggtctggatccacatcaagaacgtattcgtcaacgttatacgtcgcgtgaaatgtatgaacaagaatttgaagcggtgtggagtgcgcaagctgcgcatcaccctgcgattttaactgatgatctcaaagcacgtgttcaccatgctgtgtttcatcaacgtcctctgcataatcaaagctacttagcgggttcctgtacgttagaacccgatcgtaagcgtactccttgggcatgtcttattgcacaacgttttcgcatgttgcaaaagctgaatgatacacgtgttttaccagcgtccgggcccgaacgtcccttatcggatgaggaacgtcaaactgtattgacagagttagatcgcaagaaggagttgaaatttgatcgtgtacgtaaacttttaggtttgagcgcagattcaagttttaattgggaaagcggtggtgaagatcgtttagttggtaataccactaacgcccgtctcgcaaaagtgtttggtaaacgttggtggtccttgagcccggatgatcgtgatcaagttgttgaagatgtgcgttcgtatgaaaaggcggaagcattggcacgccgcggccgtgagcattggggtctcgatgaaaaggccgctggcgagctgagcaaacttagccttgaagatggatattgtcgtctgagccgccaagcgattgaacgtctgttaccgggcatggagaaagggaccgcgtatatggaactcgttcgtaaattatatcccgatcgttgggctgccgggaaacctgtagatttgctcccggcgttagcagaaacggatctggatatgcgtaatcctgttgtccgtcgttgtttgacagaattacgtaaagtagtgaatgcggtggtgcgccattatggtaaaccttcagcaattcgtattgaactggctcgcgatctccgtaaaagtgccaaacaacgcgaacaaacttggcgtcgtaatcgtcgtaatcagcaagatcgtgaagcagccgcagagaaactcctgcaagaagcgcgcattgcaaatccatcacgcgcggatgtggaaaaggttctgttagcagaagaatgtggttggcattgtccgtatactgggcatggatttggtatggctgatctctttggtccacatccgcattttgatgtcgaacatattgtgccgtttagtcgtagcttggataattcctttcttaataaaacgatttgtgaagcgcgtgaaaatcgtgatcgtaaacgtaatcataccccgtatgaagcgtatggcgcagacgccgaacgctgggatcaaattattgcacgtgtgcaatcctttcgcggaaccgctagtcgtgaaaagttacgtcgttttcaacaacatgaagttgaagatttagatggcgtcgcccaacgtgagttaaatgatactcgttacgcatccctgcttgcggtacaatatgttggaatgttatatggcggcgcggtagatgcgggtcatgtgcgtcgtgttcaagcagcaaaaggtggtacaactggctacttacgtgatatgtacggccttggttttgttttgggtgaaggacgtaaagaacgttctgatcatcgtcatcatgcggttgatgctgtagcgatcgcgttgactgaccctgcggcgctgaaaagtatttcacaagcagcatctgatgaacgtcgcggtgggcgtgttagctttggtgcggtggcgttgccctgggtagattttattggcgatgtccaagccgcgattgaagcgattaatgtaagccatcgtccgtcgcgtaaagttaatggggcacttcatgaagaaaccttttacggtccccgtgggatggatggcgacggtcgccctaccgggtatgtacaacgtaaacctgtcgagcgcttaagcgccaaagaaattccgaatatccctgatcctgcggtacgtgaggcggttcaagctaagctggacgaagtaggtggtactcctgcacaagcctttaaagatcctgcgaatcaccccgtgcgtaaacgtggcattccagtgcataaagtccgtctccgtctgaatattaatcctgtacaagtggggtctggcgcaactgaacgtcatgtattaacgggcagtaatcaccatatggaaattattgaagtacgcgatgcaaagggtggaaagaaatggacggggcgtttggtacatcgcttagaggcgaaacgccgtgccctgggtcgcgaaacaatcgtggatcgtgcagtacaagcaggccgccaatttcaatttagtttgtcgcctggtgatatgatcgaacttaccggtgaagatggcgaacgcaaacttcatgtggtgcgttcgattagcgagggtcgtattgaatacgtggatgcccgcgatgcccgtaagaaagccgatattcgcgcttctggcgattggcgtaaacctgctgttggttcattgctccgtttacattgtcgcaaagtggtggtgaccccttttggggaaattcgttatgctaacgat

SEQ ID NO: 173 - DNA, 3084 bp, Artificial Sequence
  Description of Artificial Sequence: Synthetic polynucleotide
  MG6-3 sequence codon optimized for E. coli
atgaaaaaagtattaggcatagaccttggtgttgcttcaataggctggggaataattgaaacagatgagaaaaatgagaatgggagaatccttaaatccggtgtaaggatttttcaggggaatgaacaaagagctgatgcggcaccaggtgagtcatcaaatgctgatcgaagaaataagcgttccgttagaaggcagcgtgaccgcagaacaagaagaaagataaatttatatgtcacgctaaagaagaacggcctggctcccaataaatctgaatgggacaaatgggtaagcattaatccatataccatccgggctaaagcattagatgagaaagtatcacttcatgagtttggtagggctctataccatttaaatcaaagacgaggatataaaagtaacagaaaagccggaagtgataaagaaggggctgtaaaggaaggtatctctaaagttcgcaaccatatggctaagcacaatgcaagaaccattggggaatactttcatgaaatctatgataatcatcttcagaatgatacagaacacgatgattttgactggcgaatccgggataaatatacccaccggaaaatgttcaaagaagagttcgatgcattatgggatgctcaaagcgtatttcacaaagagcttacaaacgacttaggtgaggtactaaaaaagatcatctttcatcaacggaaaatgaaaagtcagtctcatttaattggcaaatgtgaacttgaaaccgataaaaaaagaattgccaaagctcatctgcttttccaggaattcagggtgctgaaaaacatcaacaatctttctatctctgatgaaaatggcttcccaataaagctaactgagggtgatcgaaaactatttaaagaaatatttgataagaaagacaaagttagctggagtcaattaaagacagcactcattaatagtgggactattggaaataaaaatgcggtattcaatcttgaaagaggaggtcgaaaaaatattgaaggaaatcgtacgaatgctgcgctttctcacaaaaaagcctttggggaaaagtggtatgaacttgaagatgattttaagaaacatgtagtggatgttctgattcatgtagataaacctgaaatagtaaagaaccttgcattgaataagtgggatagaacggaagagcaggcagaatatattactcataaattgactctggaacagcgttatggtgggttttcggaaaaagctattaaaaagctcttgccctatttaaaaaaaggcatggaggaaagttcagctattaaaaaagccgggtattctttatttgagcaaaatccgggtaaaatgaaccagctcccaatgcctgatcagacgatcaaaaatcctgtggtttatcacgctttgatagagctccgaaaagttgtgaatggaattatcagggaatatggaatgcctgatgtaatcagagtcgaattggcacgggatttaaaagccgggtatgagcgtcgccaaaaaatgaccaaaaagatgcgagagcttgaaaagaaaaacgacaaagcatataaagcattacagaaagaaccattcaatattcaataccctggatataatgacatcatctggtttaacctatgggaagagtgcgataaaacctgtccttacacgggcaagaccattccagcagaagcattcaactcaggagaatttcagattgaacatattctccctttcagtcgctctttagataattcgtatgctaataaaacattatgcgaagcagattttaaccgcaagaaaggtaatcgtaccccgtgggaatgtgtggaagccggaataatggaggaagataccatgctgcagcgcattcgaaacctcccctggaataagcggaataaatttacacagaaagaaatagatgaagataaattcctgaatcgtcaattaagtgacacccggtatataagcaaggaagcaagttcttatctcaaacatctgtcttgtgaacgtgtagaagtggtgaagggacaaacaacctccttacttcgccacttgtgggggcttaacggtgtattgaataaagaaggtcctgatatgaaaaaccgggatgatcatagacatcatgcaatagatgctattgtagttgcttttactaaccgttctacgcttaaacgtttgagtgatgaaaataagcgaattggtacagccgaatggatggatgctgatgaaagtggaagagcgactaacgatgaaataaaacgacggttaggtggaagaattgacctgagtgaaccatggccgactttcagaaatgatgtggaggttagtatcaacaatatcaccgtttcacatcgggtaaatcgtaaggtctccggtgccttgcatgaagaaacctattacggacccaccgatgaaccggctcctaaaaacaaggaaatgatggtattacgaaagtcggtacaccagttatctaaaaaagacctgggacttatacgggatgagaccattcgacaaatcgtaaacgatgaggttcaaaaaagaatggataacggagaatctcaggctaacgctattgcaagtcttgaggctgatccgccatttatcatttctccaaaggcaaaagtaccgatcaggaaagtgcgattattgatgaaaaaagatcctcagatcatgcattattttgagaataaaaatggagaagaagaccgggcagccctgtatggtaataaccatcacatagccatttatgaaacatcggataaaaatggggtgaagaaacaaatagggattgtaattcccatgatggaagccgcccgaagagttaaagatggagaccccatcgtaatgaaagactatcgccctgaccacacttttctctattctttagctaaaaatgatatgatttttaatcatgaagatgaacaaatataccgtgtccaaaaaataaattcagatggcacaattatgtttagacaaaataacgtagctatgaaaggtcaatcagatcctggtgtatatttcaaatcaggcagtcgtttaggtgcatcaaaaattaagatctccccaattggagaaatcttccctgcaaatgattaa

SEQ ID NO: 174 - DNA, 3507 bp, Artificial Sequence
  Description of Artificial Sequence: Synthetic polynucleotide
  MG7-1 sequence codon optimized for E. coli
atgagtaataaaacaattttaggcctggacttaggtgttagttcgataggctgggcaatcatagagcggaatgatgagaatggaagaattgtgaaatcaggcgtaagagtcatcccaagctccaaatctgaattgagtgtattcaaagactttgacaaaggaaagccggcatcattttcaaaagaaagaactgaaaaacgaggaattcggaggtcttatttcagaaaaaagctgagaagggcaaaactcattgagcacctaaaagagaataatatgttcgatcctgaacttttggggccgaaatattctatagatgtatgggagtggagagaaaaggccacaaaagaaaaaattaccctggctcaattaggtagagtgctattgcatatcaatcagaaaagaggatataaaagcaatcgtaaggctattgttgatgaggaaagcgattcaaactggcttaatgcaattaatgataactcgaaattactacgagaaaaaggaatcacggtaggagagtatttttaccaggaaggtaaactgcatgaaagaaagccaaaagtcaaatttgctcttcattttcgaatgaaagtgagaatattcaatcgtaaagattacctcgacgaaattgaacagatctggaaaaagcaaagtgagttttatccggaacttacagacgaattgaaggagagcatcattgaccacactatcttttatcaaagacctttaaaaagcgcaaaacatttactgagcgaatgcaggtacgaaaagatgcataaagtcattgctcgttcaaatccactatttcaattatttcgagttcttgaaaaagtgaataacctcagagctgaagatgcgttcggaaacaaccgtgagatcactgatgaagaaaagcttaaaattattgaggcttgtaccagtgcccaaagctggaagttattagacaagaagaagaacttgtccaaaagcaaaattaagagcattcttggtttaggaaaagattatgaaattaatcttgactcaatagaagggagtaaaacactgcactctatttgggaagtattgatgaagtcatggggtgaggcaggagactggattgattttgactggagtattcaggggaatgacttttctaagcaaaagtcttatcaattatggcatgccctttacagtatagacgaaccacaatatttgagaaaaaaactctgtgaaggttttggctttgatttggatacggcgaggttactcatgaacattcgattagagagtgattatggggccttgtccgcgagagccattaaaaggattatacctgagttgttgaagtttcctaaagatgctaccaaagccatagaaaatgcaggatataaatttacggacagcgaaaccaaagaggaaagagagtccagagaacttaaagatagaatagaacacctgaaaaaaggagccttaagaaatcctgtcgtcgaaaaggtgctcaatcaattggtgactctggtaaatgctatttatgcccacccggaattgcccaatcccgatgaaatcagagttgagttagccagagaactcaaaagtggtgctaaagaaagaagacgagccgaattaggaatggccagagctgctaaggacaacgatcggatcagggaacttctacaaacagagttcggtataccatatccaggtcgtcgtgatatattgagatatcgcttttgggaagaacaggatatgcgttgtgtttattctggtgatgtgataccaagaaataaactcttcgtaggggaagagtatgaattggatcatatcattccaagagcccggctttttaatgattccaattccaaccttgttctggtgaaaagtagtgagaataaggataagagcgatatgaccgcggcggattacatgaaatcaaagggagaaaaagcttttgaggagtacctcgttagagtaaagaatctttacgacaaaggagctaagaaaaaagcaggcgaacgtggctccggaattaataaaggcaagcgtaatttcctgatcatgaagaaagaggaaattcctcaagacttcatcgaaagacaattaagagaaagtcagtacatcgtcaaggaagcagtgaaactcttaaaagaggtctgcagggatgttacgacaacaacaggtaagatcaccgatctgctgaaacaccaatggggagcaaatgatgtattcagaaatattcaagttcccaagtacagaaagtggggaatgactgagacaatcgttgatcgtaaaaccggcgaagtgattgagcgaattattgattggagcaaacgtaaggatcatcgtcaccatgcattggatgccataatagtagcatgtacaagacaatcatatatacagcaattgaacaggctgaacgtactctacgaaaatgattacgagtctctaaaaagctatcggaaatttgaactgccctggccgtcatttcataatgatcttatcagttcattggaaagtcttctggtgtcgttcagaaataaaaggcgagtggccacaatgaacaaaaacaggattaaagtaggaggaaagaagaagtatatcgttcaaaaaaccctcacgcccagagatgcttttcacctcgaaacgacatatggtagaagacttgtaaataattataagcttgtcaagttgaacaagaagttttccatggaattggccgagttagtgattgaccctgatttaaaagaaaagattttaaacaggctcatggaatttggcaatgatcctcaaaaagcttttgctaaccttaagaagaatccattcaaatggaaaaatgaaaatttagaagaagtcctgatctacgatgaggtgtttacgacgcgcaaaaaactggatgaaaaattcaataatccctcagagatcattgaccctgaggtgagagagattgtaacacaaaggctgaaggaatttgataacaacccaaagaaagcatttgccgatatcgagaataagcctgtgtggtataataaagataaacagatcagaattaagactgtcaatacaagagcaaaggcttcagatctataccccgtgagaacaaaggaaaacggaaatccaaaggattttgtgtttaccagaaataaccatcacatcacggtatatcagaaagaagatggaaagtactatgataaagtaaccagtttctgggaagcatttgagttgaaaaaggctaaaatgcctatctataaagaaaatgatgatgctgccaaggcggttctacatttgaagatcaatgatatggtattggttgacctaaatcctgaagacctggatcaaaacgatccggaattctttaatactctatcagaacacctttatcgggtgcagaagctggcttcgggcgatgttactttcagacatcatttagaaactgaattatccaataagaatacagaggttagagtgacaaatgcggagagcctgtataatagggtagtcatgtatccattggatgttttaggcttgcccaaataa

SEQ ID NO: 175 - DNA, 3462 bp, Artificial Sequence
  Description of Artificial Sequence: Synthetic polynucleotide
  MG16-1 sequence codon optimized for E. coli
atgattaagaatatcctcggcctcgacttgggcgtcggatccatcggctgggcactgattcagactgaggacgatcagccaaaacaaatcattggcatgggctcacgcattgttcctctgacaaaggacgactccgatcagttcaccaagggccaggcgatcagcaagaatgcggaacgcactgcgcgccgtaccacacgtaagggttacgaccgctatcagctgcgtcgcgcgctgttaacgcaggtgctgcgccaaaacgggatgctgccggaatgcatggacgaaaacatgatcgacctgtggaaactgcgttctgatgctgcaaccgaaggaaagcagctgacgctccaacaaatcggacgtgtcttataccacattaaccagaaacgtggctacaaacacgctaagagcgacgacaacggcgacagcaagcagacgaagtacgttgaagctgtgaaccttcgttacaaagagattcaggagaagaacgtaaccgtgggacaacacttctacgccgagctgctgaactcaaaggtcgagtcgggaaacggcccatactacacctttcgtattaaggacaaggtctttccgcgtgcggcatacattgccgaattcgatcagattatgggagtccagaaagaatactatccgaacgtcttaacggacgaattaattgaaacgttacgcaaccgcatcatcttttaccaacgcccactcaaaagctgtaaacacttagtgggtctgtgtgaattcgaaatgcgcccatacaagaaggatggcaaaatcgtgtacggcggccctaagtgcgcccctcgtacgagcccactggcgcagttatgcgctatgtgggagacagtgaacaatatcactctcactaaccgcaacaatgaacgtcttgagatttcaaacgaacaacgccgccagctggtccagtttctgtgcacccatgagactctgaagttaaccgatctctataaaatcctgggaatcactaagaaggacggctggtacggtggcaaggccattggtaagggcatcaagggcaacgtgacgctgaaccaattacgtaaggcgctcgacggcaagtactcacagtggctcgagatgccgatcgaacgcattgacgtcgttgaccgtaacactgccgaggcattctgggcggtcagcccgaaagtagaggaaaccccactgtttcagctgtggcacgccgtgtacagtctgcagaacgtggaagagcttactaagaccctgcaaaaccgcttttctatcacagatccgcaggtcattgacgccctttgcaaaatcgactttgtcaaacctggctacgctaacaaaagccacaaattcattcgtcgcctgctcccgtacctgatggaaggtatgatgtactcagaagcttgcgcgtgcatccaaatcaaccatagcaactctatgacgaaggcagaacgtgaggcccgccctctggccgagcgcattgagttactccagaagaacgcgctgcgtcagccggtcattgagaaaattctcaaccagatgatcaacttagtaaaccgcctgcaacaggagtacggcccgatcgacgaggcccgcgtagagctggcccgcgaattaaaacagtctcgcgaggaacgcaaggacgccttcgatcgcaacaacaagaacgaaaagcgtaacaaagaaatctccgcgctgatctccgagcagggcatccgccctagccgttctcgtattcagaagtacaaaatgtgggaagagtcggagcaccgctgcatgtactgtggcaaagtggtgaacttaagtgaatttctcaatggcgccgacgtggaaatcgaacacatcattccgcgctccatcctgttcgatgacagcttctctaacaaagtctgtgcgtgtcgcgactgcaaccgcgaaaaggacaacatgacagcgatggactacatggcctcaaagcccgagggcgaattcgaggcgtacaaacaacgcgttgacgaggctttcaacgctcatcgcatttccaaaaccaagcgtgatcacttactgtggcgtcgtgcggatattccacaggacttcatcgaccgccaacttcgcctgagccagtatattgcgacgaaagcagttgaaatcctgcagcagggcatccgccaggtgtggactagcggtggcggcgtaaccgactttctgcgtcatcagtggggctacgacgaaatccttcacaccctgaacttgcctcgctaccgccaggtggaagacctgactgaaatggtccactatgaacatgccggccaggaacacgatgaggaacgtattaagaattggtcaaaacgcatcgatcaccgtcaccacgccatcgatgcattaacggttgctctgacgcgtcagtcctacattcaacgcctgaacactctggaagcaagccatgaacacatggaaaagcttgtcaaagaagcgaacaccccgtacaaggaaaagaaatctttgttagaaaagtgggtggcgctgcagccccactttagcgtggaagaggtgacaacccaggtagacggcattcttgtcagctttcgcgctggcaaacgcgtgactacgccggctcgccgtgcggtctaccacggtggtaagcgtaccattgttcagcgcggaattcaggtaccgcgtggtgcccttaccgaggacaccatttacggaaaattgggtgacaaattcgtggttaagtatgcattagatcacccttcaatgaaacccgaaaacatcgtggatccgacgatccgcttgttggtagaaaaccgtattactgccctgggtaagaaggacgcatttaagaccccactgtattcagctgagggaatggaaattaaatccgtccgttgctacacatcgctgtcggaaaagggcgtcgtgccgatcaaatacaacgagaaaggtaacgcgatcggtttcgcgaagaagggtaacaatcaccacgtggccatttacaaggaccagtcgggccagtatcaggagatggtcgtgtccttttgggacgcggtggaacgtaagctttacggcgtgccaactgttattaccaacccgaagacagtgtgggacgaactgctggaaaaggagctgccacaggactttctggagaagctcccgaaggacaactggcagtacgtgcttagcatgcaggagaacgagatgttcgttctgggcatggaagaggacgagtttaacgatgcgatcgacactcaggactacaacactctgaacaaacacctgtaccgcgtccagaagttatcgcacgccgactacacctttcgcttccacaccgagactaaggttgacgacaagtacgacggagtagaaaacggtcgcaacacttcaatgtctctgaaggcactggtacgcatccgctctttcaacggcctgttcacccagtttccgcacaaggtgaaaatcgacattatgggacgcatcaccaaagcg

SEQ ID NO: 176 - DNA, 3603 bp, Artificial Sequence
  Description of Artificial Sequence: Synthetic polynucleotide
  MG2-4 sequence codon optimized for Human
atgaactccacaagaagcacccccctcgttctgtccttcgacattggctacgcatctatcgggtggtccgttgctgaagtggtcgacccagccaacaaccttcaggccggggttgtgactttcccaagtgatgatgtcctcaacagcgagcgggccgggcaccgcagagcccggcgtaatatcgcagcccggcgcaacagggtgcaacgtctcaagttggccagcgtgggggccggatttgtcaccgccgaggagattgagactctggaccgaatggaacgaaagtccgcgcctgagtggcggcactgtccttggtttttggccgccagggtgctgggagagtccccagagtctacattgactggtcttcagctgttccacgtgcttcggtggtacgctcacaacagaggttacgcccccccatcctgggggctgttcgacgaggcagacggcgaacaggaagaggactttgaaaaggtgcgcaacgccgagaaagccatgcacgagttcggagcagacaccatggcccaaacgtggtgcgctctgctggacgcggatcctaccgcaggtaggtggcccgaaccccggcactgggcaaagggggagaatatggcattcccacgcgagagggtccaggccgaggtcacacgactgttggttgcccatgtgggcaagttacctggtgtgacttccgatttcgttagatgtctgatcgacgattgggagcaccaccccaagatcagaagttggctccagggagcagaccctcggacggggaagttgcgggactatgccctccctaaaaggtatgaaggcgggctgctgttcggccagcacataccaagatttgacaacaaaatcattccatggtgccctttcaccctcaaggaagacacaaatagtggcaagatcagtgggcgtaacgtcccaaagaaacatagtcgtgcattcctggactttaaggtcgcaatgaggctcaacgacctggccctttccgaactgggcgagagtgggggaagactctccgccggacagaggatgaccctcttcaagcggattgagggttacggggacgtaacagtgcgacagtttgcagacctggtggccgaagtgtgcgccatccccaagccagacctgactactcgcattccagagcgcgaggggagcgacagaccctttgaactccgccctgagcggaaagccctcatcgctattctcaccgggggccgcagtctgccttcatggccccttatccactccatatgggattgcttcgaggatgcggaagccgttctcagacctgtgttccacggcaagccaaccagctgggctgacctgatagagcaggcgaaggccccagacgtgctccttgaaagactggaagaactgtttagactgggaaagggaaaaccctccaggtctaagaaggctcagcccccccccgacttcgaggttctgcttagatgcaaaatcaccataaccaaagcacacggaagggcaaggtactgtagcgacaagcttcgagccgccaccgacgaagcgctgggcggtctggacccacggcgtgctcctactactgaaacctcagacgacgcgggttgcctgtatctgaacgagcgtcagcgggaccttcaagatcggctccccctgagcaagctcaccaacaatcacctcgtgcgccataggctcctgattttcagaagattactgcaggacttggtgaatacatatgctaacggggacagggaacgtatcgacgccatagtggtggaagtagcacgagatcttaatgagtacagtggaaagaacaccaagcagcgcgtcgctctgttccaggaaaaacaaaggccctttaacgatgcagctgaagcatttgctcaggctctcatcgatgacgcccagtacaccccagaacaggcccaggctttagccacttacgccaatgtgagaagatttcggctgatgcgggagcagaattttgaatgcccattcacaggaagacacctgtcagctgaggatattgctaaagatagggtggactttgagcatattataccccgcagccttaaacctaccgattccctggatgccatggtaatcacataccgcgctgtcaatcaggcaaaacgcaataggaccgccatgagatttattaaagacatggcaggagaacggctcgacgcagatgatgcaggatggagctatcataccccccagcagttcgagacagcagtgaataggatgaggcccaagggaaggctgaacacagctgctaagcgcagtcaggccaaccgttgcgacgcgttgttggttgaggactatgagcccagagaggccgattttctgcagagagatcttacccagaccggctacctcatgaagtatgccgtgggggaggcacgtaagttttttagatctgccccccggcagcctaggtttattcacttggaaggccgggtcactactttttttaaaaaagcctggaggctcaccgaaaccctggccccgattagtccactgttcctgcgagagtacgcggatccacggaccggccgatggcagtccacagtgaggccaaaagccgaactccgcagattcactcagcttcatcacgcgttggacgcactgacacttggacttgccaccgctctggtgcccggtatcgaacgaaaggagctgcgcagagccctgtccctgagacaggccaaaggcgacgatgccaccctcctgaggagtgatccgaaactgggcgaggctctgaggtggcgaacagaagatcgttttgaagccgccccactgtccggcaagcttgagtccgccgttcggagggcacttgcagaaggccgagtagttcagcacgtgccagccaagcgccaggggatgaaggtggactcaaattttttcggatttgtcgaatttgacgaaaccggacggctgagagtcaggcaaaagatgcgatcacccaccaccagacgcagggaaatcaagaccactgttaagaatggaaaaaatttgcataccctgtctcacctgtcactggatcctaaaagctggctgggagcccctgatcatcctcttaggcggaagcaacttgagcacggtctgcgaaccgaaaatgatctcgctaatcccaaactggggaatatcagggggatgctgcccatacgggagaattggggcatcgcactgattacaaaagacggatcccccagactggacgtgattccatatataaacgtgcaccaatggctggaagtgctggccctggagaatggaggaggcagccctgtcgtacttagaaagggtcatctcgtggggtttgacgccgaaaaatgccccgaagaatattgtggcgcctggatgcttctgggggtcaaagatggacgctcaggcactaccctggagctgataaggccctggatggtcgctcctcgtaaaggcggcaccaaagagtccagcgctaagcaggctattaagcccgcgagtggctattctgaaaaggagggcaaggcttccggcgtgtttttgcagcgttccgcagacgttttcctcaagctgggccttcgccctctggatcacgacctgactggcattgccgctttc

SEQ ID NO: 177 - DNA, 3081 bp, Artificial Sequence
  Description of Artificial Sequence: Synthetic polynucleotide
  MG6-3 sequence codon optimized for Human
atgaaaaaagtgttaggaatcgatctgggcgtggcctccattgggtggggcattatagaaaccgatgagaagaatgaaaacggccgaatccttaaaagcggggtgaggatatttcagggaaacgagcagagggctgatgcagcgcccggcgagtcctcaaacgctgataggaggaacaaacggtcagtgcgtagacagcgggaccggagaaccagaaggaagatcaatctctacgttacactgaaaaagaatgggctggccccaaacaaaagcgaatgggataagtgggtgagtatcaatccttacacaattcgtgcaaaagccttagatgagaaagtgagcttgcacgagttcggtagagcactctaccacctcaatcagcggcgcggctataaaagcaacaggaaagccggcagcgacaaggagggggccgtcaaagagggtatctccaaagttagaaaccatatggcgaagcacaatgcgaggacaatcggcgaatattttcacgaaatctacgacaatcacctgcagaacgatactgaacacgatgatttcgactggcgcatccgcgataaatatacccacagaaagatgtttaaggaggaatttgatgctctgtgggatgctcagtccgtgtttcacaaagaacttactaacgacttaggtgaggtccttaagaagatcattttccaccagcgaaagatgaaatctcagagccacttgatcggcaagtgcgagctggaaaccgacaaaaagaggatcgcgaaggcccaccttctcttccaggagttccgggtgctgaaaaacattaataacctgagcattagcgacgaaaatgggttccccataaagttaaccgagggcgacagaaagcttttcaaggagatcttcgacaagaaggataaggttagttggtcacagttaaaaaccgcactcataaacagtggcacaatcgggaacaagaacgcagtctttaacttggaaaggggagggaggaaaaatattgaggggaacaggacaaatgcggcactttctcataagaaagccttcggcgaaaagtggtatgagctggaggacgattttaagaaacatgtcgtagatgtcctgatacacgttgacaaaccggagattgtaaaaaacctcgcactgaataaatgggaccggacagaggagcaagctgagtatattactcacaagctgactttggaacaacgttacggcggcttttccgaaaaggccattaagaagctgctgccatatttaaagaaaggcatggaagagagttccgcgatcaagaaagcaggatattcactgtttgaacaaaatccaggtaagatgaatcagcttccaatgcccgaccaaactataaaaaacccggtcgtgtaccacgctttaattgagctgcgcaaagttgtgaacgggattataagggaatacggcatgcctgatgtgatccgcgtcgagctggcaagggatctcaaagccggatatgaacggcgccagaagatgacgaaaaaaatgagggagctggaaaagaagaatgataaggcttacaaggcgcttcaaaaggaaccttttaatatccagtatccaggctataatgacattatttggtttaacctctgggaggaatgcgataagacatgcccctacacagggaagactattcctgccgaagcattcaactctggagagttccagattgagcatatcttgcctttctccagaagtctcgataattcttacgctaacaaaactttgtgcgaggcggattttaacagaaagaaaggcaatcgcacaccctgggagtgcgtggaggctggcatcatggaagaagacacgatgctgcagcgtatcagaaaccttccctggaacaagaggaacaagttcacacagaaagagatagatgaagacaaatttcttaatcggcagctgagcgatactcggtatattagtaaagaggctagctcttatctcaagcacttatcttgcgagagggtggaagttgtgaaaggccagaccacatccctgttgcgccacctgtggggtcttaacggggtgctcaataaagagggtcctgacatgaagaatagagatgaccatcggcaccatgccatcgacgccatcgtggtcgcttttaccaatagaagcacgctcaagaggctctcagacgaaaataaaaggattgggaccgctgaatggatggacgccgacgagtctgggcgcgcaaccaatgatgagatcaaaaggcgcttgggagggcggatcgacctgagtgagccttggccaacatttcgtaacgatgtcgaggtgagtataaataatattactgtgagccaccgggtaaaccgcaaagtgagcggggctttacacgaggaaacctattatggtcctacagatgaaccggcgccaaagaacaaggagatgatggtgctgaggaaatcagtgcatcagctctccaaaaaagacctcggccttataagggacgaaacaataaggcagattgtcaacgacgaagttcagaaacggatggataacggtgagtctcaagctaatgccatcgcctcattggaagcagaccccccattcatcatttctccgaaagccaaagtgccaattagaaaagtacgcctgctgatgaaaaaggacccccagatcatgcactacttcgagaataagaatggcgaggaagacagagccgccctttacgggaacaatcatcacatagccatttacgaaaccagcgataagaacggtgtgaagaagcaaattggcatcgtgattcctatgatggaagccgcgagaagagtcaaagatggtgacccaattgtgatgaaggactaccgtccagatcacaccttcctgtactccttagccaagaacgacatgatcttcaatcatgaggacgagcaaatttaccgggtgcagaagatcaactctgatggcactatcatgttcaggcagaacaatgtggcaatgaaaggccagagtgacccaggcgtatacttcaagtctggctccaggctgggggcatcaaaaataaaaatttctcccatcggcgagatcttcccggccaatgat

SEQ ID NO: 178 - DNA, 3504 bp, Artificial Sequence
  Description of Artificial Sequence: Synthetic polynucleotide
  MG7-1 sequence codon optimized for Human
atgagtaacaagacgattcttgggctggatctgggggtttcatcaatcgggtgggctataatcgagcgcaatgacgagaacggccgaatcgtcaaatccggtgtaagggtaatcccatcatccaaaagtgagcttagcgtgtttaaggattttgacaaaggcaaacccgcgagcttcagcaaagagagaactgagaagagagggattcgccgatcatacttccggaagaaactgagaagggccaagttgatcgagcacttaaaggaaaataacatgttcgacccagagctgctgggtcctaagtattcaattgacgtgtgggaatggagggaaaaggccacgaaagagaagatcactctggcgcaactgggcagagttttactccacatcaatcagaaacgcggctataaatctaaccgaaaggcgatagtcgacgaggagtctgattcaaattggctgaacgccatcaacgacaattccaagctgctgagagagaaaggaatcaccgtgggagagtatttttaccaggaaggtaaacttcatgagcgtaaaccaaaggtgaagttcgcactccattttcgcatgaaagttagaatctttaaccggaaagactatttggatgaaatcgagcagatttggaagaagcaatcagaattctaccccgaactgaccgatgagctcaaagaatctatcattgatcatacgattttttatcagcgtcctctgaagagtgccaagcaccttctgagcgagtgccgttatgaaaagatgcataaggtgatcgccagatctaatcccctctttcagctgttccgagtccttgagaaagtgaataacctgcgagcagaggacgcattcggcaataatagagaaatcactgacgaggagaagctgaagatcatcgaagcatgtacaagtgcccagagctggaagttgctggacaaaaaaaagaacttatccaaaagcaagatcaagtcaattctcggattaggcaaagattacgaaatcaatctggattctatcgagggttccaaaacgttacatagtatttgggaagtactcatgaagtcttggggggaagcaggtgattggatcgactttgactggagcatacagggcaacgacttctctaagcaaaaaagttaccagctttggcacgccctgtatagcatcgatgaacctcagtatctgcggaagaagctttgtgaggggttcggtttcgatctggacacagctagacttttgatgaacataagactcgagagtgattatggagcactgtcagctcgagcaatcaagaggattatccccgaactgttgaagttcccaaaagacgcgaccaaggcaatagagaacgctgggtataagttcaccgactcagaaacgaaggaggagcgcgagtcacgggagctgaaggacagaatcgagcacttaaaaaaaggtgcactccgcaatcctgtggtggaaaaagtgcttaatcaacttgttaccctggtgaacgctatatacgctcaccctgaactgcctaaccccgacgaaatacgggtggagttggctagggaattaaagtctggggccaaggagcggcggagggctgaactgggaatggcccgtgccgccaaagataacgacaggattcgggagctgcttcagacagaattcggtatcccttatccggggcgacgcgatattctcaggtatagattttgggaggagcaggatatgaggtgtgtctattctggtgatgtgatcccaagaaataagctgtttgtaggagaggagtacgaactggatcatattatcccgagagcacgattgttcaatgactctaattctaacctggtactggtgaagagctccgaaaataaagacaaatccgacatgactgctgcagactacatgaaatctaagggagagaaagcatttgaagaatatctcgtccgcgtaaagaacttatacgataagggcgccaagaagaaggccggagaacggggcagcggcattaacaagggcaagcggaatttcctcatcatgaaaaaggaggagattccccaggatttcattgagagacagctgcgagagagtcaatacattgtgaaagaagccgtcaaactgctgaaggaagtgtgcagggacgttacaactacaactggtaagatcactgacctcttaaagcaccaatggggtgctaacgatgtgttccggaacatacaggttcccaagtacaggaaatggggcatgacggaaacaatcgtggaccgcaagacaggtgaagttatcgaaaggatcatcgactggagcaagagaaaggatcacaggcatcatgctttggatgctataattgttgcatgcactcgccagtcttacattcagcagctcaatcgtctcaatgtgctgtacgagaatgattatgagagcctgaagtcctaccgcaagttcgagctgccctggccctcttttcataatgatctgatctcaagtttggagagtctgctcgtttctttccgaaataagcggagggtggccaccatgaataagaacagaatcaaagttggcgggaagaagaaatatattgtccagaagactcttacaccccgcgatgcctttcacttggagacaacatatgggaggagacttgtgaacaattataaactggttaaactcaataaaaaattttccatggagctcgctgagctggtcatcgatcccgatcttaaagagaagattctcaacagactgatggaattcggcaacgaccctcagaaggcctttgctaatttgaaaaaaaaccctttcaaatggaaaaatgagaacctcgaagaagtgttgatttatgatgaagtctttaccaccaggaaaaagctggatgaaaagttcaacaatcctagtgagataattgaccccgaggtaagggaaatcgtgactcagcggctcaaggagttcgacaataaccccaaaaaggctttcgccgacattgaaaataagcccgtttggtacaataaagacaagcagattcgcatcaagaccgttaatactcgggctaaggcatcagatctttatccggtcaggacaaaagagaacggcaaccccaaggactttgtgtttactcgcaataatcaccacatcactgtgtatcagaaggaggacgggaagtactatgacaaggtcacttctttttgggaggcattcgagctgaagaaggccaaaatgcctatttataaggaaaacgatgacgccgccaaagcggtcttgcacctgaagataaatgatatggtgcttgttgacctcaaccccgaggatttagatcagaacgatcccgaattttttaatacactgtcagagcacttgtatagggttcagaaactggcctccggcgacgtcaccttcaggcatcatctggaaacggaactgtcaaataaaaacacagaagtccgggtaaccaacgctgagtctctgtataaccgcgtggtgatgtaccccctggacgtattaggcctccctaaa

SEQ ID NO: 179 - DNA, 3462 bp, Artificial Sequence
  Description of Artificial Sequence: Synthetic polynucleotide
  MG16-1 sequence codon optimized for Human
atgatcaaaaacattctcgggctcgacctcggcgtggggagcattggatgggccctcatccagactgaggatgaccagccaaagcagatcattgggatggggtctagaattgttcccctgacgaaggacgattccgatcagttcacaaagggacaagcaattagcaagaatgcagaacggaccgccagacgcacaaccagaaagggctacgatcggtaccaattacgaagggctctgcttacacaggttctgcgccagaacgggatgttaccagagtgcatggacgagaacatgattgacctgtggaaacttagatcagatgcggcaaccgaaggcaagcaattaaccctgcaacaaatagggcgggttctctaccatatcaatcagaagcggggctataagcacgctaagagtgacgacaacggggactcaaagcagacaaaatacgttgaggcggtgaacttgcggtataaggaaatccaagagaaaaacgtcaccgtgggccagcacttttacgccgagctgctgaactccaaggtggaatcagggaatggcccttactacaccttcaggatcaaagataaagtttttccccgtgctgcatacatcgctgaatttgatcagataatgggggtacagaaggagtactaccctaacgtacttacagacgaactgatcgaaacgttgcgcaacaggatcattttttaccagcgccctctcaaatcttgtaagcacctcgtggggttatgcgagttcgagatgcggccttacaagaaggacggaaagatagtttacggcggaccgaagtgcgctccacgaacttcccctttggctcagctgtgtgcgatgtgggagactgttaacaacattactctgacgaacaggaacaacgagcggctggagatcagcaacgaacagaggcgacaactggttcagtttctgtgcacgcacgaaacactgaaacttacagacctctacaaaattttgggcatcactaagaaagacggctggtacggaggtaaggcaattggcaaaggaattaaaggaaacgtcactttaaaccaattacggaaggctctcgatggtaagtacagccagtggctcgagatgcctatcgaaaggattgacgtggtggatcggaatacagccgaagccttttgggctgtgtctccaaaagtcgaggagactcctttgttccagctgtggcatgctgtctacagcctgcagaatgtggaggagcttacgaaaacgctgcagaacaggttttccataacagacccacaggtcatagatgctctttgcaagatcgattttgtgaaaccagggtacgctaacaagtctcataaattcattagacggttactcccatacctcatggaaggtatgatgtatagcgaagcttgcgcttgcatccaaatcaatcactcaaactctatgactaaggcggagagggaagcgaggcctttggctgaacgaatcgagcttttacagaagaacgccctgcgccagcctgttattgagaagatactcaatcagatgatcaatctggtcaaccgcctccaacaggagtacggacctattgatgaagctagggtggaacttgcgagagagcttaaacagtcaagagaagagcggaaggatgccttcgatcgcaataataagaacgaaaaacgcaataaagagattagcgccctcataagcgaacagggaatccggccttcaagaagcaggattcagaagtacaagatgtgggaggaatcagaacatcgctgtatgtactgcggcaaggtggtcaacttgtccgagtttctgaacggcgccgacgttgagattgaacacatcataccacgatccatcttgtttgatgactcattcagcaacaaagtgtgtgcctgtcgcgattgcaatcgcgagaaggataacatgaccgccatggattatatggcatccaaaccggagggagaattcgaagcgtataaacaaagggtggacgaagctttcaatgctcatcggatttccaaaaccaaaagagatcaccttctgtggaggcgagcggacattccacaggattttatcgatagacagctgagactgagccagtatattgcaacaaaggcggtcgagatcctccagcagggaattcggcaggtatggacgtctggcggtggcgtgaccgattttttaaggcaccaatggggctacgacgagattttacataccctgaacctgcctcggtaccgccaggtggaggacttgaccgaaatggtgcattatgagcatgccggccaggagcatgatgaagaacggataaagaactggtcaaagagaatagatcacagacaccacgccatcgacgcactgacggtggctttgaccagacaatcttacatccagagactgaacaccttggaagcttctcatgagcacatggagaaactggtgaaagaagcgaacactccgtataaagagaagaagtcattgctggaaaaatgggtggccctgcagcctcacttcagtgtggaagaagtgaccacccaggtggacggtatcctggtgtcatttcgtgctgggaaacgcgttaccacccccgctaggcgggccgtgtatcatggaggcaaacgaaccatcgtgcagagaggtattcaggtgccacggggcgccctgaccgaagacactatctacggaaaactgggggacaaatttgtcgtgaagtacgccctggatcaccccagtatgaaacccgagaatattgtggacccaaccatcaggctgctcgtcgagaacaggatcacagccctcggcaagaaggatgcgtttaaaacccccctctatagcgccgaggggatggaaataaagtccgtcaggtgctatacctctctgtccgagaagggggtcgtaccaatcaagtacaacgagaagggcaatgctattggcttcgctaaaaaggggaacaatcatcacgtcgccatctataaagaccagagtggccagtaccaagaaatggtggtgtctttctgggatgctgttgagcgaaagctgtatggggttcccaccgttatcactaaccccaagaccgtttgggacgagctcctggaaaaagagctgccgcaggactttctggagaagcttcctaaagataactggcagtatgtcctcagtatgcaggaaaatgaaatgttcgttctgggaatggaggaagacgagtttaatgatgcaatcgacacccaggattacaatacacttaacaagcacctctatagggttcagaaattgtcacacgcagattacacattccggttccatacggagacaaaagtcgatgataaatatgatggggtggaaaatggacgcaacacgagcatgtccctgaaggctctggtcagaatcaggagtttcaatggcttgttcacacaattcccacacaaggtgaagatcgacattatgggacggattaccaaggcg

SEQ ID NO: 180 - protein, 7 aa, Simian virus 40
  SV40 NLS
PKKKRKV

SEQ ID NO: 181 - protein, 16 aa, Homo sapiens
  nucleoplasmin bipartite NLS
KRPAATKKAGQAKKKK

SEQ ID NO: 182 - protein, 9 aa, Homo sapiens
  c-myc NLS
PAAKRVKLD

SEQ ID NO: 183 - protein, 11 aa, Homo sapiens
  c-myc NLS
RQRRNELKRSP

SEQ ID NO: 184 - protein, 38 aa, Mus sp.
  hnRNPA1 M9 NLS
NQSSNFGPMKGGNFGGRSSGPYGGGGQYFAKPRNQGGY

SEQ ID NO: 185 - protein, 42 aa, Homo sapiens
  Importin-alpha IBB domain NLS
RMRIZFKNKGKDTAELRRRRVEVSVELRKAKKDEQILKRRNV

SEQ ID NO: 186 - protein, 8 aa, Murine polyomavirus
  Myoma T protein NLS
VSRKRPRP

SEQ ID NO: 187 - protein, 8 aa, Murine polyomavirus
  Myoma T protein NLS
PPKKARED

SEQ ID NO: 188 - protein, 8 aa, Homo sapiens
  p53 NLS
PQPKKKPL

SEQ ID NO: 189 - protein, 12 aa, Mus sp.
  mouse c-abl IV NLS
SALIKKKKKMAP

SEQ ID NO: 190 - protein, 5 aa, Influenza virus
  influenza virus NS1 NLS
DRLRR

SEQ ID NO: 191 - protein, 7 aa, Influenza virus
  influenza virus NS1 NLS
PKQKKRK

SEQ ID NO: 192 - protein, 10 aa, Hepatitis delta virus
  Hepatitis virus delta antigen NLS
RKLKKKIKKL

SEQ ID NO: 193 - protein, 10 aa, Mus sp.
  mouse Mx1 protein NLS
REKKKFLKRR

SEQ ID NO: 194 - protein, 20 aa, Homo sapiens
  human poly(ADP-ribose) polymerase NLS
KRKGDEVDGVDEVAKKKSKK

SEQ ID NO: 195 - protein, 17 aa, Homo sapiens
  steroid hormone receptors glucocorticoid NLS
RKCLQAGMNLEARKTKK

SEQ ID NO: 196 - protein, 1053 aa, Staphylococcus aureus
  J7RUA5_CAS9_STAAU (aligned to MG1-2, 6)
MKRNYILGLDIGITSVGYGIIDYETRDVIDAGVRLFKEANVENNEGRRSKRGARRLKRRRRHRIQRVKKLLFDYNLLTDHSELSGINPYEARVKGLSQKLSEEEFSAALLHLAKRRGVHNVNEVEEDTGNELSTKEQISRNSKALEEKYVAELQLERLKKDGEVRGSINRFKTSDYVKEAKQLLKVQKAYHQLDQSFIDTYIDLLETRRTYYEGPGEGSPFGWKDIKEWYEMLMGHCTYFPEELRSVKYAYNADLYNALNDLNNLVITRDENEKLEYYEKFQIIENVFKQKKKPTLKQIAKEILVNEEDIKGYRVTSTGKPEFTNLKVYHDIKDITARKEIIENAELLDQIAKILTIYQSSEDIQEELTNLNSELTQEEIEQISNLKGYTGTHNLSLKAINLILDELWHTNDNQIAIFNRLKLVPKKVDLSQQKEIPTTLVDDFILSPVVKRSFIQSIKVINAIIKKYGLPNDIIIELAREKNSKDAQKMINEMQKRNRQTNERIEEIIRTTGKENAKYLIEKIKLHDMQEGKCLYSLEAIPLEDLLNNPFNYEVDHIIPRSVSFDNSFNNKVLVKQEENSKKGNRTPFQYLSSSDSKISYETFKKHILNLAKGKGRISKTKKEYLLEERDINRFSVQKDFINRNLVDTRYATRGLMNLLRSYFRVNNLDVKVKSINGGFTSFLRRKWKFKKERNKGYKHHAEDALIIANADFIFKEWKKLDKAKKVMENQMFEEKQAESMPEIETEQEYKEIFITPHQIKHIKDFKDYKYSHRVDKKPNRELINDTLYSTRKDDKGNTLIVNNLNGLYDKDNDKLKKLINKSPEKLLMYHHDPQTYQKLKLIMEQYGDEKNPLYKYYEETGNYLTKYSKKDNGPVIKKIKYYGNKLNAHLDITDDYPNSRNKVVKLSLKPYRFDVYLDNGVYKFVTVKNLDVIKKENYYEVNSKCYEEAKKLKKISNQAEFIASFYNNDLIKINGELYRVIGVNNDLLNRIEVNMIDITYREYLENMNDKRPPRIIKTIASKTQSIKKYSTDILGNLYEVKSKKHPQIIKKG

SEQ ID NO: 197 - protein, 1101 aa, Actinomyces naeslundii
  J3F2B0_CAS9_ACTNH_4ogc (aligned to MG3)
MWYASLMSAHHLRVGIDVGTHSVGLATLRVDDHGTPIELLSALSHIHDSGVGKEGKKDHDTRKKLSGIARRARRLLHHRRTQLQQLDEVLRDLGFPIPTPGEFLDLNEQTDPYRVWRVRARLVEEKLPEELRGPAISMAVRHIARHRGWRNPYSKVESLLSPAEESPFMKALRERILATTGEVLDDGITPGQAMAQVALTHNISMRGPEGILGKLHQSDNANEIRKICARQGVSPDVCKQLLRAVFKADSPRGSAVSRVAPDPLPGQGSFRRAPKCDPEFQRFRIISIVANLRISETKGENRPLTADERRHVVTFLTEDSQADLTWVDVAEKLGVHRRDLRGTAVHTDDGERSAARPPIDATDRIMRQTKISSLKTWWEEADSEQRGAMIRYLYEDPTDSECAEIIAELPEEDQAKLDSLHLPAGRAAYSRESLTALSDHMLATTDDLHEARKRLFGVDDSWAPPAEAINAPVGNPSVDRTLKIVGRYLSAVESMWGTPEVIHVEHVRDGFTSERMADERDKANRRRYNDNQEAMKKIQRDYGKEGYISRGDIVRLDALELQGCACLYCGTTIGYHTCQLDHIVPQAGPGSNNRRGNLVAVCERCNRSKSNTPFAVWAQKCGIPHVGVKEAIGRVRGWRKQTPNTSSEDLTRLKKEVIARLRRTQEDPEIDERSMESVAWMANELHHRIAAAYPETTVMVYRGSITAAARKAAGIDSRINLIGEKGRKDRIDRRHHAVDASVVALMEASVAKTLAERSSLRGEQRLTGKEQTWKQYTGSTVGAREHFEMWRGHMLHLTELFNERLAEDKVYVTQNIRLRLSDGNAHTVNPSKLVSHRLGDGLTVQQIDRACTPALWCALTREKDFDEKNGLPAREDRAIRVHGHEIKSSDYIQVFSKRKKTDSDRDETPFGAIAVRGGFVEIGPSIHHARIYRVEGKKPVYAMLRVFTHDLLSQRHGDLFSAVIPPQSISMRCAEPKLRKAITTGNATYLGWVVVGDELEINVDSFTKYAIGRFLEDFPNTTRWRICGYDTNSKLTLKPIVLAAEGLENPSSAVNEIVELKGWRVAINVLTKVHPTVVRRDALGRPRYSSRSNLPTSWTIE

SEQ ID NO: 198 - protein, 9 aa, Unknown
  Description of Unknown: uncultivated organism
  MG1-1 to 1-3 MOTIF
RHHALDAMV

SEQ ID NO: 199 - protein, 9 aa, Unknown
  Description of Unknown: uncultivated organism
  MG1 motif 2.1
KHHALDAMC

SEQ ID NO: 200 - protein, 9 aa, Unknown
  Description of Unknown: uncultivated organism
  MG1 motif 2.2
KHHALDAIC

SEQ ID NO: 201 - protein, 8 aa, Unknown
  Description of Unknown: uncultivated organism
  MG1 motif 3
  MOD_RES (2)..(2): Any amino acid
PXGFSRPA

SEQ ID NO: 202 - protein, 8 aa, Unknown
  Description of Unknown: uncultivated organism
  MG1 motif 4
  MOD_RES (2)..(2): Any amino acid
PXGFCRPA

SEQ ID NO: 203 - protein, 8 aa, Unknown
  Description of Unknown: uncultivated organism
  MG1 motif 5
  MOD_RES (2)..(2): Any amino acid
PXGYCRPA

SEQ ID NO: 204 - protein, 8 aa, Unknown
  Description of Unknown: uncultivated organism
  MG1 motif 6
  MOD_RES (2)..(2): Any amino acid
PXGYSRPA

SEQ ID NO: 205 - protein, 10 aa, Unknown
  Description of Unknown: uncultivated organism
  MG1 motif 7
  MOD_RES (8)..(9): Any amino acid
PIVRHRLXXF

SEQ ID NO: 206 - protein, 10 aa, Unknown
  Description of Unknown: uncultivated organism
  MG1 motif 8
  MOD_RES (8)..(9): Any amino acid
PVVRHRLXXF

SEQ ID NO: 207 - protein, 10 aa, Unknown
  Description of Unknown: uncultivated organism
  MG1 motif 9
  MOD_RES (8)..(9): Any amino acid
PLVRHRLXXF

SEQ ID NO: 208 - protein, 13 aa, Unknown
  Description of Unknown: uncultivated organism
  MG1 motif 10
  MOD_RES (5)..(5): Any amino acid
  MOD_RES (10)..(10): Any amino acid
FKALXSAIQXRGY

SEQ ID NO: 209 - protein, 13 aa, Unknown
  Description of Unknown: uncultivated organism
  MG1 motif 11
  MOD_RES (5)..(5): Any amino acid
  MOD_RES (10)..(10): Any amino acid
FKALXNAIQXRGY

SEQ ID NO: 210 - protein, 13 aa, Unknown
  Description of Unknown: uncultivated organism
  MG1 motif 12
  MOD_RES (5)..(5): Any amino acid
  MOD_RES (10)..(10): Any amino acid
YKALXSAIQXRGY

SEQ ID NO: 211 - protein, 13 aa, Unknown
  Description of Unknown: uncultivated organism
  MG1 motif 13
  MOD_RES (5)..(5): Any amino acid
  MOD_RES (10)..(10): Any amino acid
YKALXNAIQXRGY

SEQ ID NO: 212 - protein, 7 aa, Unknown
  Description of Unknown: uncultivated organism
  MG1 motif 14
LKLLNLR

SEQ ID NO: 213 - protein, 7 aa, Unknown
  Description of Unknown: uncultivated organism
  MG1 motif 15
MKLLNLR

SEQ ID NO: 214 - protein, 11 aa, Unknown
  Description of Unknown: uncultivated organism
  MG1, MG2 motif 1
  MOD_RES (4)..(4): Any amino acid
  MOD_RES (9)..(10): Any amino acid
PRFXNRIIXXC

SEQ ID NO: 215 - protein, 11 aa, Unknown
  Description of Unknown: uncultivated organism
  MG1, MG2 motif 2
  MOD_RES (4)..(4): Any amino acid
  MOD_RES (9)..(10): Any amino acid
PRFXNRILXXC

SEQ ID NO: 216 - protein, 7 aa, Unknown
  Description of Unknown: uncultivated organism
  MG2 motif 1
NNHLVRH

SEQ ID NO: 217 - protein, 7 aa, Unknown
  Description of Unknown: uncultivated organism
  MG2 motif 2
NNHLIRH

SEQ ID NO: 218 - protein, 7 aa, Unknown
  Description of Unknown: uncultivated organism
  MG2 motif 3
NNHIVRH

SEQ ID NO: 219 - protein, 7 aa, Unknown
  Description of Unknown: uncultivated organism
  MG2 motif 4
  MOD_RES (4)..(4): Any amino acid
EFLXFRW

SEQ ID NO: 220 - protein, 7 aa, Unknown
  Description of Unknown: uncultivated organism
  MG2 motif 5
  MOD_RES (4)..(4): Any amino acid
EFLXYRW

SEQ ID NO: 221 - protein, 7 aa, Unknown
  Description of Unknown: uncultivated organism
  MG2 motif 6
  MOD_RES (4)..(4): Any amino acid
EFMXFRW

SEQ ID NO: 222 - protein, 10 aa, Unknown
  Description of Unknown: uncultivated organism
  MG4 motif 1
  MOD_RES (5)..(5): Any amino acid
  MOD_RES (8)..(8): Any amino acid
QQFRXLQXVN

SEQ ID NO: 223 - protein, 7 aa, Unknown
  Description of Unknown: uncultivated organism
  MG6 motif 1
SNRKTGK

SEQ ID NO: 224 - protein, 7 aa, Unknown
  Description of Unknown: uncultivated organism
  MG6 motif 2
SNRKSGK

SEQ ID NO: 225 - protein, 10 aa, Unknown
  Description of Unknown: uncultivated organism
  MG6 motif 3
  MOD_RES (4)..(4): Any amino acid
  MOD_RES (7)..(8): Any amino acid
MYEXEFXXLW

SEQ ID NO: 226 - protein, 16 aa, Unknown
  Description of Unknown: uncultivated organism
  MG16 motif 1
  MOD_RES (2)..(4): Any amino acid
  MOD_RES (7)..(8): Any amino acid
  MOD_RES (11)..(12): Any amino acid
WXXXKAXXKGXXGNTT

SEQ ID NO: 227 - protein, 16 aa, Unknown
  Description of Unknown: uncultivated organism
  MG16 motif 2
  MOD_RES (2)..(4): Any amino acid
  MOD_RES (7)..(8): Any amino acid
  MOD_RES (11)..(12): Any amino acid
WXXXKAXXKGXXGNAT

SEQ ID NO: 228 - protein, 16 aa, Unknown
  Description of Unknown: uncultivated organism
  MG16 motif 3
  MOD_RES (2)..(4): Any amino acid
  MOD_RES (7)..(8): Any amino acid
  MOD_RES (11)..(12): Any amino acid
WXXXRAXXKGXXGNTT

SEQ ID NO: 229 - protein, 1002 aa, Unknown
  Description of Unknown: uncultivated organism with predicted taxonomy: Planctomycetes
  MG6-7 effector
MSEITLGLDIGSNSIGWALLNLDENPSIINVGVRVFQEGVNRDTKGAEISKNETRRMARGARRNRFRRNYRKDKLLRLMKRNGLLPKEASTNGEIFLLNPYQLRAKGLDEKLSLHEFGRVLYHLNQRRGFLSNRKSGKAKDDGIVIKSAGELQQKMDAQGARTLGEYFSRIDITQERIRDNYTFRGMYQKEFDLLWEKQSSFYPEILTPELRQTIADETIFYQRPLKPTDELIGDCALEPDHKRCPRGDWHARRFRILQDVNNLMVCEPDGRKRILTEQERSIALKELFGRKEVGFDSLRKKLGLIENQTFNFEEGSLDKKESKLKGDFFASEMSSKKILGKKGWEALDIATQIEINDLLLDDNLADEEVVEMLKQQYGFSDEQAEAAIKISLPRGYMTYSRLAIQKLLPHLERELRTDEAVQAAYGHIHSVQDTGQTVDFLPLPEDLRNPIVNKALIEARKVINAVIQTYGKPGKIVVEMARDVKGNAKEREELRIKMNRNEKENERARHELIHNMGITRPTRDDILKYKLWQECGRECPYTGRPISQQALFGEHPEFQIEHIIPYSRCLDDSFMNKTLCYVDENRRKGDQTPYEFYKNSDQYEHMLQRIRKLPYPKRQKFTQKEVSLDEFIKRQLNDTRYITREILRYLKQLGCTVTGSRGKVTSELRHQWGLNSILESDLPGPKNREDHRHHAIDAVVTALTNQKHLHELAATKYAVAHDGFPVPWEGFRDAVAQAVNKIQVSHRVTRKVSGPLHEETSYGPTGLKDDKGQDIFVYRKKLEALTCPMVEKIVDPVVKEVVKTRLLEFGIDPKKKGSIPKEVWAEPLYMKSTKSAKVPIKKVRIRDVFNNMIPVNDEIGKPYRYVASGNNHHIEIFEYTDAKGNLKRNGKVISMFEAVQRSRQGKPVIYRDYGDGKRFVCSLAKNEMFMLEVEEGRHILHRVQKFGEVGGTIIIVLRPHTFAGKVNDSDKPPYIQRKTPNTLKGYKVTIDPLGRIFPAKD

SEQ ID NO: 230 - protein, 994 aa, Unknown
  Description of Unknown: uncultivated organism with predicted taxonomy: Planctomycetes bacterium
  MG6-8 effector
MSDYTLGLDMGSNSIGWALLDTNNRAVVDAGVRVFQEGVDRDTKGAEVSKNETRRTARSARRARKRRNYRKDKLFRMLIRHGLLPKGPDELKEVFELDPYLLRAKGLDEKLDAYEFGRVLYHLNQRRGFWSNRKSGKSKEDGVVVKSATALAEAMDESRSRTIGEYFAGVDSHEKRIRGHYTFRSMYEEEFEALWTKQASFDGELFTDGLKKAIKDETIFFQRPLRWDPETIGDCELEPGEKRCPRADWHARRFRILQTVNNLKLYNPDGREGDLSKYRETIIGELCNRKEVYFDSLRRKLGLIDSQTFNFEEGAAEKKAKLKGDEFVPQLKKAIGAKALKGLEEADIIEINDALIDDNIEDEELVEKLMEQYGFSEEQANGVVNISLPSKYTNFSRLALQKLLPKMEAGLRTDEAIEAVYGKRQAVGEIEKRRRLGSVPDLRNPIVMKALWEVRKVVNGLVREYGIPRKIKIEMARDVKGSVKERDEIRVKQWKNEQENKRAEEELKLMGIRNPSFNDRLKYKLWEECGKECPYTGKPISQHQLFGEHPDIQIEHILPYSRTLDDSYMNKTLCYVNENRLKGNETPYEYYAENRVEQWEEILQRIKVLPYAKRRRFWQKEVVLDNFIQRQLNDTRYISREVVKYLKQLGCIVTGTKGQITSELRHQWGLNNILDYTGAGLKNRDDHRHHAVDAVVTAVTEQKHLGGLAASKYDKSGIEFDPPWEGFREQVAEKINAINVSHRVTRKVSGQLHEETSYGPTGLKDDKGQDIFVYRKPLEALTLPMAAKIVDPVVREIVYERLREFGIDPDGKSKIGKEVWKEPLYMKSKSGKGPQIKKVRIRDVFNNMIYIKDDAGKEYRAVAPGNNHHIEIFEYANKKGRIKRDGKVVTMYEAVRRSVNNKQVIRRDYMDDKKFVCSLSKNEMFMLEVEDGVHVLHRVQKLIQDGRIVLRPHTYAGKVSDSDNPPLVQRKNYNTLRGYKVTVDPIGRIHRAND

SEQ ID NO: 231 - protein, 896 aa, Unknown
  Description of Unknown: uncultivated organism
  MG6-9 effector
LNEKLELFEFGRAIYHINQRRGFKSNRKTGKAKEDGKVAKAAGELQKKIEANGCRTLGEYFASINPEEERIREQYTFRTMYEEEFDKLWNRQAEFYKNVLNGDLHKKIRDEIIFYQRPLKPTDDLIGDCELEAGEKRCPRGDWYARRFRLLQDVNNLKVYNPDGTARELEDDESGIILKKLATHKEVKFSSLRKELGLLKTQEFNAEYQIDNKGKKQEKLKGDAFNASMRSKNIFGAKTWDAMDEAEKIKLNEWLVDLDDDELIEKLSSEYGLRDEQIDRVLKISLPQRYMNFSRKAIQKLLSLMEKGKRTDEALAEIYPDRNKRAKGEEKDRLDLPDDLRNPLVNRGLFEVRKLVNAVIREHGKPSGIVIEMARDVKGSLKEREEIQWKMRENEKRNEAARTRLIQDMDILNPSRDDVIKYKLWEECGKRCPYTGKVISLTDLFGSNPVFQVEHILPYSRSLDDSYMNKTLCCVNENRIKGNKTPYEFYSGDEEKYEQVKQQIKVLPWPKRRRFLQKEIKLDECIQREMNDTRYICKEVVKYLKQLGVNVRGSKGRVTAELRHQWGLNSILDLNNSNMKNRDDHRHHAIDAVVTAVTKNEHLRRLAKSKYSKTDSSFSEPWEDFREELAEKVKHINVSHRVRRKVSGKLHEDTSYGLTGAKDDKGQEIFVYRKKIEDLTIPMVSKIADHVVRQIIESRLKKHGIDLDKNQTIPKDVWTKPLYMKNTKSNKKVLIKKVRIRDAFNNMIFLKDKEGKTYRAVAPGSNHHIEIFEYTDKKGKMMRGGEIVTMFEAVKRKREDQPVIKRECGADKKFICSLAMNEMFMLDTNNKEKELHRVQKITQSGNSISIILRPHSYAGKVSDYDKPPIIQRRSPNTLKGHKVTVDMLGRVHLAND

SEQ ID NO: 232 - protein, 996 aa, Unknown
  Description of Unknown: uncultivated organism with predicted taxonomy: Planctomycetes bacterium
  MG6-10 effector
MSKYTLGLDIGSNSIGWALLDTGKSPKIIDLGVRVFPEGVDRDTKGAELSKNATRREARGARRNRWRRAYRKDKLVRMLQREGLLPREFDLIQKLMETNPYLLRAKGLDEQLGLHDFGRVLFHINQRRGFKSNRKTGKASDNNKVAKEAGQLQEAIDNTGCRTLGEYYANLNPEKNRIRSQYTFRSMYEKEFALLWAKQSEFYPEILTEQLKEEIKDKTVFYQRPLKPTDDLIGECDLEEGEKRCPRGDWYARKFRLLQDVNNLKIHHSDGSEDPLTDEQRAIVLEQLKKSKAVKFSSLRKKLGLLETDEFNMEYEVNEKGKKKDKIQGDEFNASMQKNIFGLKRWGEMAEGEKIRLNEWLVDLEDDELIEKLASEYGFSDEQTEKVLKISLPSRYMSFSQKAIKKLLPLMEEGKRTDEALDKIYPDRNQKKQVEAERLGLPEDLRNPLVNKALFEVRKVVNAVIREYGKPAKIAIEMARDLKGSLRERKEIHFKQKENERENKRVRERLKNDFNHVSLNRDNIIKYKLWEECNGLCPYTGKKIPQYALFGENPEFQIEHILPYSRSLDDSYMNKTLCEVHENISVKGNQTPYEAYHHDEEKYEQIKQRIKVLPWPKRRKFLQKEIELDEAITRELNDTRYICREAVRYLKQICSNVKGTRGKITSELRHQWGLNSILNLTDPNMKNRDDHRHHAIDAAVVAVTRNKHLRELAESKYAKTGSGVKFEAPWKDFREELAEKIKHINVSHRVTRKVSGQLHEETAYGPTGLKDDKGQDIFVYRKKLEDFTMPMVGRIVDPVVKEIVVDRLKKHGLNPEKKQTIPKEVWREPLYMKSKTGNGPRIKKVRIRDVFNNMIMLKDQNGKPYRAVAPGNNHHIEIFEYKDKDGNIKRDSKVVSMFEAVRRRRKGEPVIQRDHGEGKKFICSLSTNEMVMMPDKEGNNDLFRVQKMSINKQIYFRHHTAATIDNEETLIRKQANLFNGKKVAVDPIGRVFPAND

SEQ ID NO: 233 - protein, 994 aa, Unknown; identical to SEQ ID NO: 230
  Description of Unknown: uncultivated organism with predicted taxonomy: Planctomycetes bacterium
  MG6-11 effector

SEQ ID NO: 234 - protein, 896 aa, Unknown; identical to SEQ ID NO: 231
  Description of Unknown: uncultivated organism
  MG6-12 effector

SEQ ID NO: 235 - protein, 996 aa, Unknown; identical to SEQ ID NO: 232
  Description of Unknown: uncultivated organism with predicted taxonomy: Planctomycetes bacterium
  MG6-13 effector

SEQ ID NO: 236 - protein, 1063 aa, Unknown
  Description of Unknown: uncultivated organism
  MG6-20 effector
EAFDEANPYTLRKMALYGPLTSEQFGRVLFQQGKRRGLKSNRKAERKADDGDVNRATKRLEAKIADDDCQTLGERLYRIGAGQIADSQNVKPGDLNPHRIRGRYTLRKMYEEEFEKLWNKQEQHIPELRAEGLKSRIRRIIFDQRALRSSKHLIGRCECTGQRRAAKADWYAQEFRLLKDLNHLRIHNSDGSEQDLKKEQRLRLAELLRCTDRLTFDEMRQELGLIDSQIFNLEEGPSATVGQTNEGKKSKVRAGAKRKSLAGNSIESALWKAFGKNWALQTEVRKDEIRQAIVEIEDEEKLMRLAVGLWGLKRTQAEALAKLHLPEGYAKYSLDALKNLVAELRKGLKSERGIAEYEARERCGYNSPVTQSLLDFLPSPVKPDRRPLVNNPIVRQSLFEVRKVVNAIIRQYGRPKRVVVEMIREIKGSLRQRAEIRDQQEASRKDREEIRTMLRDPIEFGKDNPSNDDILAYRLWEQQGHLSPYSGKTICQTDLRRFLNGEGVLEIDHILPYSKSWDNSQSNKCLCFSDENKNKKDFTPRQWLGDGTDAYTSMLQYVAGMKTTGMPFSKRRKFSQLEVDPEDCAKRQLNDTAYIAREVRQYLKCLYSEEELVRDESVVCTRGQVTSDLCWCWELNSILNPDDQRETKNRADLRHHAIDAIVVALTTRQRLFALSQVFAKKHSLAKAKHEPWPHFREDVENAVLAIKVSHRPRKRVSGPLHNDTIYGATDEDGRFVSRKFLTDLTPTMVSRIRDARVREAVVERLRKHGIKAKGADSIRDVGPEETPGDSDKRIPKKIWEEPLILVRKDCTEGPRPTPIMKVRLIGPEKTIRPIRNGAALVKPASTHHLSLFEIRKSNGDPEWIAHFVHLIDAAQIVGERQRRFSMIRKQLGAARLPSSEIKRRLELEQCRLDIELPLIVKTHPDIPSARFLFSLSKGEMLLLSIKGKEQLYRFETAASTTEQMWFLKHNEAAIPKNKRLSKKPDNLRGLKPRKVILDPLGRDVSGTGKVYDRVDSKVGDLAKEIIANGMSNSRGHKLLKQMGLGQLGAQLTAELRRLRSGGL

SEQ ID NO: 237 - protein, 1121 aa, Unknown
  Description of Unknown: uncultivated organism with predicted taxonomy: Arcicella aurantiaca
  MG7-2 effector
MKKIVGLDIGVSSIGWSYVLESEIETDEETEDIIELGSRIIPLSNDDADQFSKGQSITKNKERTQKRTARKTNNRYKLRKHKLGEVLKNQEIIINPELFDLTAYELYALRVRAIHEPITLAELARLWYQFNQKRGYQSLRGVVDEEADKKSDYLSSINDRSQFLKDNKQTVGQFLFNRLKDYEQNRGVIEPITHIIFNRQDYFNEFNLIWERQKMEYPEVLTDELLANIRDRIIFYQRPLMSQKHLVSDCTFEKNHKAAPKSSPLFQVFKIWQDLNHFEIKTKRGAIVAFTVEMKQKVFEVLDNQFDINKTKFWEILELKASEHRLNFKEIRGNVSKAKLVEAFAELDINRPDLLSFDPHGDPDEQPLFRIWHLLYSINEKNADEILLRTLQNTPYNFSEKEAIGLIQKVSFKNDFGSLSSRAMRKILPHLEQGLNYADACLEVGNRHSHYRTKEENNERVLADKLLPLPKNSLRQPVVEKIVNQVINVMNAILADSNLGRPDEIRIELARELKQNIKQRERTERNNNKRQKARKDVVKEILKTFPDMKEKDVTNRMIQKYELFQETNGICVYTGTEMKLGAVLSGQGFDIEHIIPKSRRFDDSFMNKTLADSSTNRDKNDLTAYDFMRKKGMTSFEKFTEIIHKLHKDKKISDTKLDNLLTTLNPVWIAEQEAKALSTDFINRQLNETQYITKQVKAELDKICRTITVTSGGITDYLRHQWGVDDVLKNINLEKYEAAGKVSDEDYRDRQGHWRTRKKIADWSKRDDHRHHAIDALVIACTKPAYIKRLNDLNQEYDSYKEMKKDGGKMESLTKFPQPKMKGGFIQNVTKATENILISFKAGKKAVSTSKNKKTGQVNIIPRGQLHEETVYGQKFDESGKPYFVIRKKLEFNKQGYFNSLAQIDKIEDEIIKKKVLKRIDEYGGDLQKALSTVIYHNEDQKIPIKKVMIQAQIKKAVPLGNHEGKFVAEGNNHHLALYRNEKGKYLTELVSVWTAVVRKQNDLDIICRNHPEGLKFITCFQQNEMFIYELSPEQVQEAIDRKDRKLLSKYLYRMQKISKKESGGIEVGFRHHLETKIDDSETAKKIKKFFIVQGVETLLKFTKVKINHLGQITKIFAEGE

SEQ ID NO: 238 - protein, 781 aa, Unknown
  Description of Unknown: uncultivated organism with predicted taxonomy: Flavobacteriales
  MG7-3 effector
MKKIVGLDIGVSSIGWSYVLESEIETDEETEDVIAMGSRIIPLSQKDTDEFSKGDSITKHKARTQKRTARKTNNRYKLRKHQLGEVLNNQGIIINPELFGLTARELYALRVRAVHEPITLSELARLWYQFNQKRGYQSLRGVVDEEADKKSDYLSSINERSQFLKDNKQTVGQFLFNRLQDYEQNRGVIEPITHIIFNRQDYFNEFNQIWERQKLEYPEILTDELLANIRDRIIFYQRPLMSQKHLVSDCTFEKNHKAAPKSSPLFQVFKIWKDLNHFEIKTKRGAIVEFTVEMKQKVFGVLDNQFDINKTKLWEILGLKASEHRLNFKEIRGNVTKAKLVEAFTELNINRPDLLSFDPHGNPDEQPLFRIWHLLYSINEKNADEILLKTLQNAPYSFTEKEAIGLIQKVSFKNDFGSLSSRAMRKILPHLEQGLPYDKACLEVGIRHSHYRTKEENNERILADKLLPLPKNSLRQPVVEKIVNQVINVMNAILADPNLGRPDEIRIELARELKQNIKQRERTESNNNKRQKARKDVVKEILKTFPDMKEKEVTQRMIQKYELFQETNGICVYTGTEMKLGAVLAGQGYDIEHIIPKSRRFDDSFMNKTLADSSTNRDKNDLTAYDFMRNKGMTAFEKFTEIIHTLHKNKKISDAKLDNLLTTLNPVWIAEKEAKELSTDFISRQLKETQYITKQVKAELDKICRKITVTSGGITDYLRHQWGVDDVLKNINLEKYEAAGKVHDEEYRDRQGHWRTRKKIADWSKREDHRHHAIDALGIAC

SEQ ID NO: 239 - protein, 774 aa, Unknown
  Description of Unknown: uncultivated organism with predicted taxonomy: Chryseobacterium indologenes
  MG7-4 effector
MKKIVGLDIGVSSIGCSYVLESKIETDEEIEDVIAMGSRIIPLSKEDTDEFSKGQTITKHKARTQKRTARKTNNRYKLRKHQLGEVLNNQGIIINPELFGLTARELYALRVRAIHEPVTLSELARLWYQFNQKRGYQSLRGVVDEEADKKSDYLSSINERSQFLKDNKQTVGQFLFNRLQDYEQNRGVIEPITHIIFNRQDYFNEFNQIWERQKTEYPDILTDELLANIRDRIIFYQRPLMSQKHLVSDCTFEKNHKAAPKSSPLFQVFKIWQDLNHFEIKTKRGAIVDFTVEMKQKVFEILDNQFDINKTKFWEILGLKASEHRLNFKEIRGNVTKAKLVEAFSELNINRPDLLLFDPHGDPDEQPLFRIWHLLYSINEKNADEILLKTLQNAPYSFTEKEAIGLIQKVSFKNDFGSLSSRAMRKILSHLEKSLNYADACLEVGNRHSHYRTKEENDERILADKLLPLPKNSLRQPVVEKIVNQVINVMNAILADPNLGRPNEIRIELARELKQNIKQRERTESNNNKRQKARKDVVKEILKTFPDMKEKEVTQRMIQKYELFQETNGICIYTGTEMKLGAVLSGQGYDIEHIIPKSRRFDDSFMNKTLADSSTNRDKNDLTAYDFMRNKGTTAFEKFTEIIHKLHKDKKISDTKLDNLLTTLNPVWIAEQEAKALSTDFISRQLNETQYITKQVKAELDKICKKITVTSGGITDYLRHQWGVDDVLKNINLEKYEAAEKVHDEEYRDRQGHWRTRKKIADWSKRDDHRHHAI

SEQ ID NO: 240 - protein, 1131 aa, Unknown
  Description of Unknown: uncultivated organism
  MG7-5 effector
MKKVLGLDLGIASIGWALIAQNSENEEISHIIDCGVRVVPLSTDEHSEFAKGGSVPTNQIRRRARGMRRNLQRYRWRRHRLYCVLGQLGMMPDQRLMTRLSPLELYSLRSRALSEPLSLQEIGRILIHLNNWRGYRSNRREAVKDDEKSRYLKEIKNNEDQLKVEDKTIGQFFAERLHQGDRQRIRGRIFGRNTYIDEFNRIWDAQAQYHPSVLTEEHRRLIRDRIIYYQRPLKSAKGLVGTCALEWYYALYKETRQPKYENGRKKIVRPKCAPKSSPLNQECKVWESIHNLRIYRRDRNGRRESQPIALTLEQKKHLFWYLQESKKNLKAEEALRLLGFSAGAYAVDDHTLENNRTLSRLKEVFKKLGIRRDDLLRFDPAIEEVEWDDLETGERRRRLQVRGDFDREPLYQLWHLIYATEDEGDLIQLLEERYGFTTEQAREIAKIDFTSEGYARKSHRALRRLLPHYREGLDYTKACEAAGYRHADYITKAENEARILSERLELLPKNALRNPVVEKILNQMVHLVNDLMTTYGRPDEVRVELARELKQSAQERKKTHELNQKRRRENERIKKDIADHLAIPPEKVTRAQIEKYRFYKEIDGISLYTGKRFSLADVLNGDTVDVEHIIPRTLRFDDSYHNKTLCERNINQEKGNMTACDYMRSRGAQEYEAYLERVKAFYEKNGREVRLKYKNLTTTQEDLLKDNEFLQRQLRESQYIARKAVEVLREVCRNVYTTTGSITDFLRHRWGWDEVIPYLRLPQFKEAGLTEIIPVQNGQKTKEVIKGWSKRDDHRHHALDALVVACTRQSHIQRINELSPILAGTYGEERRQQLLDIVRDKYIAGKIPFSFRQVCEAMNQVLVSHKQRTRVATRNCPKGSQKVQITLTPRGRLHEETIYGRIRRYKKVSLDGKFSVAMLDDMVHPHQRELVEARLAQYANNPKAAFKDLDKNPIRYGPNGEKHLREVTVWEYIMVSRKALDPKATGKALKGIIDPVVHQVVKQHFEAGNVGGLPFRHVRVENRAEEWIRLPRGYAEPGSNHHIAIYRDADGKKHEHVVTFWEAFQRVHIGLPPIITDVAGALEYLSHLPGELPELHLPENPDWQFVVSLARNDMFVFGLDPADIDLRDLKN

SEQ ID NO: 241 - protein, 1225 aa, Unknown
  Description of Unknown: uncultivated organism with predicted taxonomy: Bacteroidetes
  MG7-6 effector
MEKVLGLDLGVSSIGWAMTLQDPNNEERSEIIDCGVRIVPLDTDEIKEFGKGGNVPTNVARRQARGMRRNLQRYRWRRQQLFRALKQLGMLPDERLLRQLSPLQLYALRERALSEPLSLPEMGRVLIHLNQWRGYRSNRKEQTESDGKKPSEYLEQIEKNEERLQGQTIGQYFAARLRESGGYRIRQQLFSRETYKQEFDRIWEKQAEYHPQVLTEANRSWIRDRIIYWQRPLKSAKGLVGECALEWCYALDKNQQPIRLPNGQLKIVRPKCAPKSSPLVQVCNVWESIHNLRVYDHFGEERPLSQEEKERLFRILQDRSLTARQIIKDVLLLSPKTHTVDRLIQEKGLEYNRTRARLLEVFKEQKINREDLLEFNPVIEEVEWDNPETGERLRRLQVRGDFTQQPLYQLWHLLYATEDERNLVALLQKRYGFTEAQAKALAKLDFTSAGYARKSHRALRRLLPHYQRGLDYAAAAQAAGYRHANQMTKEENQARPLLDRLEVLPKNSLRNPVVEKVLNQLVHLVNDLIATYGRPDEIRIELARELKQSAQERQQIEKLINKNKKTNEEARKKIAEILGIDPQAVSRTMIEKWKLYEETDGLSLYSGKKIDLPTLLRGNAVDIDHIIPRVSRFDDSFQNKIFCEASLNQAKSNSTAHDFMRDQPVSGLQPYDDYRKMVKDLYEGKKISKAKYDNLMMTAEDLLKDGEFLQRQLRETQYIAKKAVEMLRQVCREVRSTTGSITDFLRHQWGWDEVIKELRLPQFRQAGEDLIEYRPAANGGRDRVVIKDWDKRKDHRHHALDALVVAFTRVSHIQRVTKLNQIMSGKFGEERRKELLRTGRDLYIAGKAPFTFAQVSKAIANILISFKQGLRVATRSRNRPKGSTTVQITLTPRGALHEETVYGRIKRYKKVPLNGKFSPAMVTEIAHPHQRALVEARLAQHNGDPKKAFKDLEKHPITYGPNGSKHLTHVTVWDYVLVARKSVDASLSEKAVEKIADRGVRRAVAERLKAGGGKSKEAFKNVGTDPVQPPRHHPVKRVRVENYAEKAIRLPRGYVEPGSNHHIAIYRDADGNKHEHVVTFWDAFQRVRLGLPAIITDVPAALQYAQDQLPEGVTDLLLPEGWDWQFVVSLAQNDMFVFDLDPSEINFTDPNNRARISKHLFKVRKLSANDYSFLHHLETEIVDDLVSKSINRCKRCSMSALSRSRAVKVKINRLGHVVEVGQPFS

SEQ ID NO: 242 - protein, 1218 aa, Unknown
  Description of Unknown: uncultivated organism with predicted taxonomy: Bacteroidetes
  MG7-7 effector
MKKVLGLDIGVNSIGWAYIAEPENKNEKYNILGAGSRIIPLNSDETSEFKSGNAISKNSARRIKRGIRRGGHRYKMRKWKLTAKLKELGMFPDKELFSLHSLELYSLRTKAISEKISLQEIGRIFYHLNQKRGYKSNRKANNDENIEVNVSDKPGKKKGYLDLINDRENILTSQKITIGQYFYYKLKEQPFFRIKDNIFTRKSYQQEFKKIWDQQSIYYPNILTEEAFNILFNEIIYFQRPLKSQKHLVTDCRFEFVFAKNNKGELLKDDTGSLRKIKLKAAPKSSPLFQLAKVWQDINNLKIQDTYGNIIEITLEKKKLIADKLQETDKITLKELKKILGLSSKEEYYYNLKKEYIEGNRTFVQLKKILGDNPLLEFNVEINERSISDYNTGETEVRKVINSSIEQSPLYQLWHLLFAAEENENLISTLCKKYSLSPETALALSKLDMTKAGYGALSTKAYRKILPYLMEGSGYSDACQLAGYRHSDYLSKEENESRQLLAKLDLYPINSLRNPVVEKVINQVINLVNAILEDPAYGRPDEIRVELGRELKQNAEERNKTFSRNKKEDAKHKDIIHRLMTECNFKKVSRRDIERYKLWEEFGYVSPYEPSKPISLSELFSGAYEVEHIIPKSRLFDDSFANKTICPRPINAAKDNQTAFDYMSGLGQQKLDEFTDFIQKHKTKKDGISQTKAKYLLCKGSEIPQDFINRQMRETAYISREVKNLLLGICRNVHSTSGTVTNYLRHIWGLDSILQELNIEKYRACGQTVKEIIGSNGSTKENERIVNWSKRDDHRHHAIDAIVIALTKQSHIQKLNNLNQEFQNYRELKQSAYNFPLPWATVHSDVLRTVSNILVSFKSGKKVATKNINRIKKNGKVVKELPTLTPRGFLHKDKFYGKIKRYETVPLTPRFKEWDRIADNNIYNQLKERLSRYKDNTKLAFSENEKDPIPKSLQSITLFQEKFVIRQELNKDFNLARTENIIDERIKRIVKGRLSQNQGNPIKAFGDLENDPIWINKEKAIDIKAVRCFTDLKDLSSLHKNDKGENIHYVSTKNNHHIAIYEDQNGNLAFNAASFWDALNRKLHDLPVIIKDPKSLWNKVLEKGIDNQDVLSNLPPENCSFRTSLQQNEMFIFGMTREEIEDDIRNENYSRISKGLYRVQNISTGKGIDVFFRHHLETKLQDSNNDKEVGKFIRCRTLNSLSLIKVLINYTGSIYLYD

SEQ ID NO: 243 - protein, 1223 aa, Unknown
  Description of Unknown: uncultivated organism with predicted taxonomy: Bacteroidetes
  MG7-8 effector
MEKVLGLDLGVSSIGWAMTLQDPNNEERNEIIDCGVRIVPLDTDEIKEFGKGGNVPTNVARRQARGMRRNLQRYRWRRQQLFRALKQLGMLPDERLLRQLSPLQLYALRERALSEPLSLPEMGRVLIHLNQWRGYRSNRKEQTESDGKKPSEYLEQIEKNEERLQGQTIGQYFAARLRESGGYRIRQQLFSRETYKQEFDRIWEKQAEYHPQVLTEANRSWIRDRIIYWQRPLKSAKGLVGECALEWCYALDKNQQPIRLPNGQLKIVRPKCAPKSSPLVQVCNVWESIHNLRVYDHFGEERPLSQEEKERLFRILQDRSLTARQIIKDVLLLSPKTHTVDRLIQEKGLEYNRTRARLLEVFKEQKINREDLLEFNPVIEEVEWDNPETGERLRRLQVRGDFTQQPLYQLWHLLYATEDERNLVALLQKRYGFTEAQAKALAKLDFTSAGYARKSHRALRRLLPHYQRGLDYAAAAQAAGYRHANQMTKEENQARPLLDRLEVLPKNSLRNPVVEKVLNQLVHLVNDLIATYGRPDEIRIELARELKQSAQERQQIEKLINKNKKTNEEARKKIAEILGIDPQAVSRTMIEKWKLYEETDGLSLYSGKKIDLPTLLRGNAVDIDHIIPRVSRFDDSFQNKIFCEASLNQAKSNSTAHDFMRDQPVSGLQPYDDYRKMVKDLYEGKKISKAKYDNLMMTAEDLLKDEEFLQRQLRETQYIAKKAVEMLRQVCREVRSTTGSITDFLRHQWGWDEVIKELRLPQFRQAGEDLIEYRPAANGGRDRVVIKDWDKRKDHRHHALDALVVAFTRVSHIQRVTKLNQIMSGKFGEERRKELLRTGRDLYIAGKAPFTFAQVSKAIANILISFKQGLRVATRSRNRPKGSTTVQITLTPRGALHEETVYGRIKRYKKVPLNGKFSPAMVTEIAHPHQRALVEARLAQHNGDPKKAFKDLEKHPITYGPNGSKHLTHVTVWDYVLVARKSVDASLSEKAVEKIADRGVRRAVAERLKAGGGKSKEAFKNVGTDPVQPPRHHPVKRVRVENYAEKAIRLPRGYVEPGSNHHIAIYRDADGNKHEHVVTFWDAFQRVRLGLPAIITDVPAALQYAQDQLPEGVTDLLLPEGWDWQFVVSLARNDMFVFDLDPSEIDFTDPNNRARISRHLFKLRKASKKQYWFLHHLETEVLEDLASKKAYRCKQCSMESLAGAVKVKINRLGHVVEVGQPFS

SEQ ID NO: 244 - protein, 1134 aa, Unknown
  Description of Unknown: uncultivated organism with predicted taxonomy: Deltaproteobacteria bacterium
  MG7-9 effector
MKKILGLDIGTNSIGWALITEPENGESGEPEILRCGVKVIAMDQKQINAFEGGQALSANQERRLKRQMRRNNWRYKLRREALVARLVELGWFPREWKDDLQARHEALKLHDARYIYGLRDKAARGERITLRELGLIWYHLNQKRGYKSNRKAQDEEESNDSVLLSQIAANDQLLREQGLTVGQYLYQQHKEHPRRPLKGKVFSRKAYLEEFDRIWEAQAAHYPDILTPELREEIRDRIIYYQRPLKSQKHLIAECPFEKRYYKDANGQLQVKGIKVAPRSSPVFQEYKIWQTLANIRITNLALAGQMGFDDRGERPLTEQERELAYQYLIKKKKVKSDTLLKRALRLDPEAGGYSIDNYEEIEGDVTRAAILSAFKKAEQRPPQWLFRFDPTREIEQQPLFQLWHMLYSIEDPAALQRKLQEKFDFDDELAAALTRVTFKEDYGSLSTRAMQRLIPHLKNGLTYDKARVKVYEETGIDSYKTHTLSKDEQLQRALAPAIEQIKVNSLRNPVVERIVQHVINLVNAIIADKSLVSDEERQSGKFEIRMEMARELKQTAKQRQKTSKQIRAREQQREAARNRLIEEGILTRPSRADIDRYLIWLEGNQMCPYTFKPIPISDLFNGRCDVDHIIPRSRLFDDSQLNKVVCYAAANREKGNRTAYEYMEQKGELEKFREHVMNTNYPFPKKKRLLSPEVPEDFIQRQLKETQYITKVVREKLWEVSHEVRTTTGAITGFLRHEWGLSNLLHDLNFPKYEAQGLVEEWVDEETGEVIKRIEDWSKRMDHRHHALDALVVALTRPAHVHYLNNLNKQFGNLARENGWRTPLRSPVTNLYQKARAAMEPILVKHQKKSRVVTSMTHRLKVKGHFSGKTQEVLVPRGPLHKESVYGLIHDNGKEEFVIRYPLDTNFRPEYVPYIVDKKVQQIVAARLRQFGNDPKKAFADLESDPIWFDEERKIPVKRVRCRTGLQAVVPVHHKADGTSVDYVQTRNNHHLAIYQRPDGSRFHRIVTFWEAVERINQGQPLYQPTIEDGQLLLTLSANDMFVFELDPDEIDFTNPANYGLISRHLYRVQKMTGDDRKLDIWFRHHLDPTTEHRKPYGEMGNFRRITSLSKLVGTKVWLDQTGRIVQHLRCIG

SEQ ID NO: 245 - protein, 1134 aa, Unknown
  Description of Unknown: uncultivated organism with predicted taxonomy: Deltaproteobacteria bacterium
  MG7-10 effector
MKKILGLDIGTNSIGWALITEPENGESGEPEILRCGVKVIAMDQKQINAFEGGQALSANQERRLKRQMRRNNWRYKLRREALVARLVELGWFPREWKDDLQARHEALKLHDARYIYGLRDKAARGERITLRELGLIWYHLNQKRGYKSNRKAQDEEESNDSVLLSQIAANDQLLREQGLTVGQYLYQQYKEHPRRPLKGKVFSRKAYLEEFDRIWEAQAAHYPDILTPELREEIRDRIIYYQRPLKSQKHLIAECPFEKRYYKDANGQLQVKGIKVAPRSSPVFQEYKIWQTLANIRITNLALAGQMGFDDRGERPLTEQERELAYQFLIKKKKVKSDTLLKRALRLDPEAGGYSIDNYEEIEGDVTRAAILSAFKKAEQRPPQWLFRFDPTREIEQQPLFQLWHMLYSIEDPAALQRKLREKFDFDDELAAALTRVTFKEDYGSLSTRAMQRLIPHLKNGLTYDKARVKVYEETGIDSYKTHTLSKDEQLQRALAPAIEQIKVNSLRNPVVERIVQHVINLVNAIIADKSLVSDEERQSGKFEIRMEMARELKQTAKQRQKTSKQIRAREQQREAARNRLIEEGILTRPSRADIDRYLIWLEGNQMCPYTFKPIPISDLFNGRCDVDHIIPRSRLFDDSQLNKVVCYAAANKEKGNRTAYEYMEQKGELEKFREHVMNTNYPFPKKKRLLSPEVPEDFIQRQLKETQYITKVVREKLREVSHEVRTTTGAITGFLRHEWGLSNLLHDLNFPKYEAQGLVEEWVDEETGEVIKRIEDWSKRMDHRHHALDALVVALTRPAHVHYLNNLNKQFGNLARENGWRTPLRSPVTNLYQKARAAMEPILVKHQKKSRVVTSMTHRLKVKGHFSGKTQEVLVPRGPLHKESVYGLIHDNGKEEFVIRYPLDTNFRPEYVPYIVDKKVQQIVAARLRQFGNDPKKAFADLESDPIWFDEERKIPVKRVRCRTGLHAVVPVHHKADGTPLDYVQTRNNHHLAIYQRPDGSRFHRIVTFWEAVERINQGQPLYQPTIEDGQLLLTLSANDMFVFELDPDEIDFTNPANYGLISRHLYRVQKMTGDDRKLDIWFRHHLDPTTEHRKPYGEMGNFRRITSLSKLVGTKVWLDQTGRIVQHLRCIG

SEQ ID NO: 246 - protein, 115 aa, Unknown
  Description of Unknown: uncultivated organism with predicted taxonomy: Planctomycetes
  MG6-7 RuvC-III domain
NDTRYITREILRYLKQLGCTVTGSRGKVTSELRHQWGLNSILESDLPGPKNREDHRHHAIDAVVTALTNQKHLHELAATKYAVAHDGFPVPWEGFRDAVAQAVNKIQVSHRVTRK

SEQ ID NO: 247 - protein, 115 aa, Unknown
  Description of Unknown: uncultivated organism with predicted taxonomy: Planctomycetes bacterium
  MG6-8 RuvC-III domain
NDTRYISREVVKYLKQLGCIVTGTKGQITSELRHQWGLNNILDYTGAGLKNRDDHRHHAVDAVVTAVTEQKHLGGLAASKYDKSGIEFDPPWEGFREQVAEKINAINVSHRVTRK

SEQ ID NO: 248 - protein, 115 aa, Unknown
  Description of Unknown: uncultivated organism
  MG6-9 RuvC-III domain
NDTRYICKEVVKYLKQLGVNVRGSKGRVTAELRHQWGLNSILDLNNSNMKNRDDHRHHAIDAVVTAVTKNEHLRRLAKSKYSKTDSSFSEPWEDFREELAEKVKHINVSHRVRRK

SEQ ID NO: 249 - protein, 117 aa, Unknown
  Description of Unknown: uncultivated organism with predicted taxonomy: Planctomycetes bacterium
  MG6-10 RuvC-III domain
NDTRYICREAVRYLKQICSNVKGTRGKITSELRHQWGLNSILNLTDPNMKNRDDHRHHAIDAAVVAVTRNKHLRELAESKYAKTGSGVKFEAPWKDFREELAEKIKHINVSHRVTRK

SEQ ID NO: 250 - protein, 115 aa, Unknown; identical to SEQ ID NO: 247
  Description of Unknown: uncultivated organism with predicted taxonomy: Planctomycetes bacterium
  MG6-11 RuvC-III domain

SEQ ID NO: 251 - protein, 115 aa, Unknown; identical to SEQ ID NO: 248
  Description of Unknown: uncultivated organism
  MG6-12 RuvC-III domain

SEQ ID NO: 252 - protein, 117 aa, Unknown; identical to SEQ ID NO: 249
  Description of Unknown: uncultivated organism with predicted taxonomy: Planctomycetes bacterium
  MG6-13 RuvC-III domain

SEQ ID NO: 253 - protein, 126 aa, Unknown
  Description of Unknown: uncultivated organism
  MG6-20 RuvC-III domain
NDTAYIAREVRQYLKCLYSEEELVRDESVVCTRGQVTSDLCWCWELNSILNPDDQRETKNRADLRHHAIDAIVVALTTRQRLFALSQVFAKKHSLAKAKHEPWPHFREDVENAVLAIKVSHRPRKR

SEQ ID NO: 254 - protein, 159 aa, Unknown
  Description of Unknown: uncultivated organism with predicted taxonomy: Arcicella aurantiaca
  MG7-2 RuvC-III domain
NETQYITKQVKAELDKICRTITVTSGGITDYLRHQWGVDDVLKNINLEKYEAAGKVSDEDYRDRQGHWRTRKKIADWSKRDDHRHHAIDALVIACTKPAYIKRLNDLNQEYDSYKEMKKDGGKMESLTKFPQPKMKGGFIQNVTKATENILISFKAGKK

SEQ ID NO: 255 - protein, 95 aa, Unknown
  Description of Unknown: uncultivated organism with predicted taxonomy: Flavobacteriales
  MG7-3 RuvC-III domain
KETQYITKQVKAELDKICRKITVTSGGITDYLRHQWGVDDVLKNINLEKYEAAGKVHDEEYRDRQGHWRTRKKIADWSKREDHRHHAIDALGIAC

SEQ ID NO: 256 - protein, 88 aa, Unknown
  Description of Unknown: uncultivated organism with predicted taxonomy: Chryseobacterium indologenes
  MG7-4 RuvC-III domain
NETQYITKQVKAELDKICKKITVTSGGITDYLRHQWGVDDVLKNINLEKYEAAEKVHDEEYRDRQGHWRTRKKIADWSKRDDHRHHAI

SEQ ID NO: 257 - protein, 156 aa, Unknown
  Description of Unknown: uncultivated organism
  MG7-5 RuvC-III domain
RESQYIARKAVEVLREVCRNVYTTTGSITDFLRHRWGWDEVIPYLRLPQFKEAGLTEIIPVQNGQKTKEVIKGWSKRDDHRHHALDALVVACTRQSHIQRINELSPILAGTYGEERRQQLLDIVRDKYIAGKIPFSFRQVCEAMNQVLVSHKQRTR

SEQ ID NO: 258 - protein, 158 aa, Unknown
  Description of Unknown: uncultivated organism with predicted taxonomy: Bacteroidetes
  MG7-6 RuvC-III domain
RETQYIAKKAVEMLRQVCREVRSTTGSITDFLRHQWGWDEVIKELRLPQFRQAGEDLIEYRPAANGGRDRVVIKDWDKRKDHRHHALDALVVAFTRVSHIQRVTKLNQIMSGKFGEERRKELLRTGRDLYIAGKAPFTFAQVSKAIANILISFKQGLR

SEQ ID NO: 259 - protein, 150 aa, Unknown
  Description of Unknown: uncultivated organism with predicted taxonomy: Bacteroidetes
  MG7-7 RuvC-III domain
RETAYISREVKNLLLGICRNVHSTSGTVTNYLRHIWGLDSILQELNIEKYRACGQTVKEIIGSNGSTKENERIVNWSKRDDHRHHAIDAIVIALTKQSHIQKLNNLNQEFQNYRELKQSAYNFPLPWATVHSDVLRTVSNILVSFKSGKK

SEQ ID NO: 260 - protein, 158 aa, Unknown; identical to SEQ ID NO: 258
  Description of Unknown: uncultivated organism with predicted taxonomy: Bacteroidetes
  MG7-8 RuvC-III domain

SEQ ID NO: 261 - protein, 148 aa, Unknown
  Description of Unknown: uncultivated organism with predicted taxonomy: Deltaproteobacteria bacterium
  MG7-9 RuvC-III domain
KETQYITKVVREKLWEVSHEVRTTTGAITGFLRHEWGLSNLLHDLNFPKYEAQGLVEEWVDEETGEVIKRIEDWSKRMDHRHHALDALVVALTRPAHVHYLNNLNKQFGNLARENGWRTPLRSPVTNLYQKARAAMEPILVKHQKKSR

SEQ ID NO: 262 - protein, 148 aa, Unknown
  Description of Unknown: uncultivated organism with predicted taxonomy: Deltaproteobacteria bacterium
  MG7-10 RuvC-III domain
KETQYITKVVREKLREVSHEVRTTTGAITGFLRHEWGLSNLLHDLNFPKYEAQGLVEEWVDEETGEVIKRIEDWSKRMDHRHHALDALVVALTRPAHVHYLNNLNKQFGNLARENGWRTPLRSPVTNLYQKARAAMEPILVKHQKKSR

SEQ ID NO: 263 - protein, 154 aa, Unknown
  Description of Unknown: uncultivated organism with predicted taxonomy: Planctomycetes
  MG6-7 HNH domain
DVKGNAKEREELRIKMNRNEKENERARHELIHNMGITRPTRDDILKYKLWQECGRECPYTGRPISQQALFGEHPEFQIEHIIPYSRCLDDSFMNKTLCYVDENRRKGDQTPYEFYKNSDQYEHMLQRIRKLPYPKRQKFTQKEVSLDEFIKRQL

SEQ ID NO: 264 - protein, 155 aa, Unknown
  Description of Unknown: uncultivated organism with predicted taxonomy: Planctomycetes bacterium
  MG6-8 HNH domain
DVKGSVKERDEIRVKQWKNEQENKRAEEELKLMGIRNPSFNDRLKYKLWEECGKECPYTGKPISQHQLFGEHPDIQIEHILPYSRTLDDSYMNKTLCYVNENRLKGNETPYEYYAENRVEQWEEILQRIKVLPYAKRRRFWQKEVVLDNFIQRQL

SEQ ID NO: 265 - protein, 155 aa, Unknown
  Description of Unknown: uncultivated organism
  MG6-9 HNH domain
DVKGSLKEREEIQWKMRENEKRNEAARTRLIQDMDILNPSRDDVIKYKLWEECGKRCPYTGKVISLTDLFGSNPVFQVEHILPYSRSLDDSYMNKTLCCVNENRIKGNKTPYEFYSGDEEKYEQVKQQIKVLPWPKRRRFLQKEIKLDECIQREM

SEQ ID NO: 266 - protein, 156 aa, Unknown
  Description of Unknown: uncultivated organism with predicted taxonomy: Planctomycetes bacterium
  MG6-10 HNH domain
DLKGSLRERKEIHFKQKENERENKRVRERLKNDFNHVSLNRDNIIKYKLWEECNGLCPYTGKKIPQYALFGENPEFQIEHILPYSRSLDDSYMNKTLCEVHENISVKGNQTPYEAYHHDEEKYEQIKQRIKVLPWPKRRKFLQKEIELDEAITREL

SEQ ID NO: 267 - protein, 155 aa, Unknown; identical to SEQ ID NO: 264
  Description of Unknown: uncultivated organism with predicted taxonomy: Planctomycetes bacterium
  MG6-11 HNH domain

SEQ ID NO: 268 - protein, 155 aa, Unknown; identical to SEQ ID NO: 265
  Description of Unknown: uncultivated organism
  MG6-12 HNH domain

SEQ ID NO: 269 - protein, 156 aa, Unknown; identical to SEQ ID NO: 266
  Description of Unknown: uncultivated organism with predicted taxonomy: Planctomycetes bacterium
  MG6-13 HNH domain

SEQ ID NO: 270 - protein, 165 aa, Unknown
  Description of Unknown: uncultivated organism
  MG6-20 HNH domain
EIKGSLRQRAEIRDQQEASRKDREEIRTMLRDPIEFGKDNPSNDDILAYRLWEQQGHLSPYSGKTICQTDLRRFLNGEGVLEIDHILPYSKSWDNSQSNKCLCFSDENKNKKDFTPRQWLGDGTDAYTSMLQYVAGMKTTGMPFSKRRKFSQLEVDPEDCAKRQL

SEQ ID NO: 271 - protein, 175 aa, Unknown
  Description of Unknown: uncultivated organism with predicted taxonomy: Arcicella aurantiaca
  MG7-2 HNH domain
ELKQNIKQRERTERNNNKRQKARKDVVKEILKTFPDMKEKDVTNRMIQKYELFQETNGICVYTGTEMKLGAVLSGQGFDIEHIIPKSRRFDDSFMNKTLADSSTNRDKNDLTAYDFMRKKGMTSFEKFTEIIHKLHKDKKISDTKLDNLLTTLNPVWIAEQEAKALSTDFINRQL

SEQ ID NO: 272 - protein, 175 aa, Unknown
  Description of Unknown: uncultivated organism with predicted taxonomy: Flavobacteriales
  MG7-3 HNH domain
ELKQNIKQRERTESNNNKRQKARKDVVKEILKTFPDMKEKEVTQRMIQKYELFQETNGICVYTGTEMKLGAVLAGQGYDIEHIIPKSRRFDDSFMNKTLADSSTNRDKNDLTAYDFMRNKGMTAFEKFTEIIHTLHKNKKISDAKLDNLLTTLNPVWIAEKEAKELSTDFISRQL

SEQ ID NO: 273 - protein, 175 aa, Unknown
  Description of Unknown: uncultivated organism with predicted taxonomy: Chryseobacterium indologenes
  MG7-4 HNH domain
ELKQNIKQRERTESNNNKRQKARKDVVKEILKTFPDMKEKEVTQRMIQKYELFQETNGICIYTGTEMKLGAVLSGQGYDIEHIIPKSRRFDDSFMNKTLADSSTNRDKNDLTAYDFMRNKGTTAFEKFTEIIHKLHKDKKISDTKLDNLLTTLNPVWIAEQEAKALSTDFISRQL

SEQ ID NO: 274 - protein, 167 aa, Unknown
  Description of Unknown: uncultivated organism
  MG7-5 HNH domain
ELKQSAQERKKTHELNQKRRRENERIKKDIADHLAIPPEKVTRAQIEKYRFYKEIDGISLYTGKRFSLADVLNGDTVDVEHIIPRTLRFDDSYHNKTLCERNINQEKGNMTACDYMRSRGAQEYEAYLERVKAFYEKNGREVRLKYKNLTTTQEDLLKDNEFLQRQL

SEQ ID NO: 275 - protein, 169 aa, Unknown
  Description of Unknown: uncultivated organism with predicted taxonomy: Bacteroidetes
  MG7-6 HNH domain
ELKQSAQERQQIEKLINKNKKTNEEARKKIAEILGIDPQAVSRTMIEKWKLYEETDGLSLYSGKKIDLPTLLRGNAVDIDHIIPRVSRFDDSFQNKIFCEASLNQAKSNSTAHDFMRDQPVSGLQPYDDYRKMVKDLYEGKKISKAKYDNLMMTAEDLLKDGEFLQRQL

SEQ ID NO: 276 - protein, 163 aa, Unknown
  Description of Unknown: uncultivated organism with predicted taxonomy: Bacteroidetes
  MG7-7 HNH domain
ELKQNAEERNKTFSRNKKEDAKHKDIIHRLMTECNFKKVSRRDIERYKLWEEFGYVSPYEPSKPISLSELFSGAYEVEHIIPKSRLFDDSFANKTICPRPINAAKDNQTAFDYMSGLGQQKLDEFTDFIQKHKTKKDGISQTKAKYLLCKGSEIPQDFINRQM

SEQ ID NO: 277 - protein, 169 aa, Unknown
  Description of Unknown: uncultivated organism with predicted taxonomy: Bacteroidetes
  MG7-8 HNH domain
ELKQSAQERQQIEKLINKNKKTNEEARKKIAEILGIDPQAVSRTMIEKWKLYEETDGLSLYSGKKIDLPTLLRGNAVDIDHIIPRVSRFDDSFQNKIFCEASLNQAKSNSTAHDFMRDQPVSGLQPYDDYRKMVKDLYEGKKISKAKYDNLMMTAEDLLKDEEFLQRQL

SEQ ID NO: 278 - protein, 153 aa, Unknown
  Description of Unknown: uncultivated organism with predicted taxonomy: Deltaproteobacteria bacterium
  MG7-9 HNH domain
ELKQTAKQRQKTSKQIRAREQQREAARNRLIEEGILTRPSRADIDRYLIWLEGNQMCPYTFKPIPISDLFNGRCDVDHIIPRSRLFDDSQLNKVVCYAAANREKGNRTAYEYMEQKGELEKFREHVMNTNYPFPKKKRLLSPEVPEDFIQRQL

SEQ ID NO: 279 - protein, 153 aa, Unknown
  Description of Unknown: uncultivated organism with predicted taxonomy: Deltaproteobacteria bacterium
  MG7-10 HNH domain
ELKQTAKQRQKTSKQIRAREQQREAARNRLIEEGILTRPSRADIDRYLIWLEGNQMCPYTFKPIPISDLFNGRCDVDHIIPRSRLFDDSQLNKVVCYAAANKEKGNRTAYEYMEQKGELEKFREHVMNTNYPFPKKKRLLSPEVPEDFIQRQL

SEQ ID NO: 280 - RNA, 98 nt, Unknown
  Description of Unknown: uncultivated organism with predicted taxonomy: Arcicella aurantiaca
  MG7-2
uucaacuuuacguaagaacaauuuguaagcaauucacaauaaaagguuuuuaccguugugaaaacauauucuggcgguaacuuuaguuaucgccuuuu

1-103. (canceled)

104. An engineered nuclease system comprising:
(a) an endonuclease comprising a RuvC_III domain and an HNH domain, wherein said endonuclease is derived from an uncultivated microorganism, and wherein said endonuclease is a class 2, type II Cas endonuclease; and
(b) an engineered guide ribonucleic acid structure configured to form a complex with said endonuclease comprising:
i. a guide ribonucleic acid sequence configured to hybridize to a target deoxyribonucleic acid sequence; and
ii. a tracr ribonucleic acid sequence configured to bind to said endonuclease.

105. The engineered nuclease system of claim 104, wherein said RuvC_III domain comprises a sequence with at least 80% sequence identity to any one of SEQ ID NOs: 45-88 or SEQ ID NOs: 246-262.

106. The engineered nuclease system of claim 104, wherein said endonuclease is not a Cas9 endonuclease, a Cas14 endonuclease, a Cas12a endonuclease, a Cas12b endonuclease, a Cas 12c endonuclease, a Cas12d endonuclease, a Cas12e endonuclease, a Cas13a endonuclease, a Cas13b endonuclease, a Cas13c endonuclease, or a Cas 13d endonuclease.

107. The engineered nuclease system of claim 104, wherein said endonuclease has less than 80% identity to a Cas9 endonuclease.

108. The engineered nuclease system of claim 104, wherein said HNH domain further comprises a sequence having at least 80% identity to any one of SEQ ID NOs: 89-132 or SEQ ID NOs: 263-279.

109. The engineered nuclease system of claim 104, wherein said tracr ribonucleic acid sequence comprises a sequence with at least 80% sequence identity to about 60 to 90 consecutive nucleotides selected from any one of SEQ ID NOs: 138-148 or SEQ ID NO: 280.

110. The engineered nuclease system of claim 104, wherein said endonuclease is configured to bind to a protospacer adjacent motif (PAM) sequence selected from the group comprising SEQ ID NOs: 149-158.

111. The engineered nuclease system of claim 104, wherein said engineered guide ribonucleic acid structure comprises one ribonucleic acid polynucleotide comprising said guide ribonucleic acid sequence and said tracr ribonucleic acid sequence.

112. The engineered nuclease system of claim 104, wherein said guide ribonucleic acid sequence is complementary to a eukaryotic, fungal, plant, mammalian, or human genomic sequence.

113. The engineered nuclease system of claim 104, wherein said guide ribonucleic acid sequence is 15-23 nucleotides in length.

114. The engineered nuclease system of claim 104, wherein said endonuclease comprises one or more nuclear localization sequences (NLSs) proximal to an N- or C-terminus of said endonuclease.

115. The engineered nuclease system of claim 104, further comprising
(c) a single- or double-stranded DNA repair template comprising from 5′ to 3′: a first homology arm comprising a sequence of at least 20 nucleotides 5′ to said target deoxyribonucleic acid sequence, a synthetic DNA sequence of at least 10 nucleotides, and a second homology arm comprising a sequence of at least 20 nucleotides 3′ to said target sequence.

116. The engineered nuclease system of claim 104, wherein said endonuclease comprises SEQ ID NOs: 1-44 or SEQ ID NOs: 229-245 or a variant thereof having at least 80% identity thereto.

117. The engineered nuclease system of claim 104, wherein said endonuclease comprises at least one peptide motif selected from the group consisting of SEQ ID NO: 223-225.

118. The engineered nuclease system of claim 105, wherein said sequence identity is determined by a BLASTP homology search algorithm using parameters of a wordlength (W) of 3, an expectation (E) of 10, and a BLOSUM62 scoring matrix setting gap costs at existence of 11, extension of 1, and using a conditional compositional score matrix adjustment.

119. A nucleic acid comprising an engineered nucleic acid sequence optimized for expression in an organism, wherein said nucleic acid encodes an endonuclease comprising a RuvC_III domain and an HNH domain, wherein said endonuclease is a class 2, type II Cas endonuclease, and wherein said endonuclease is derived from an uncultivated microorganism.

120. The nucleic acid of claim 119, wherein said RuvC_III domain has at least 70% sequence identity to any one of SEQ ID NOs: 45-88 or SEQ ID NOs: 246-262.

121. The nucleic acid of claim 119, wherein said HNH domain has at least 80% sequence identity to any one of SEQ ID NOs: 89-132 or SEQ ID NOs 263-279.

122. A vector comprising a nucleic acid sequence encoding a class 2, type II Cas endonuclease comprising a RuvC_III domain and an HNH domain, wherein said endonuclease is derived from an uncultivated microorganism.

123. A method for binding, cleaving, marking, or modifying a double-stranded deoxyribonucleic acid polynucleotide, comprising:
(a) contacting said double-stranded deoxyribonucleic acid polynucleotide with a class 2, type II Cas endonuclease in complex with an engineered guide ribonucleic acid structure configured to bind to said endonuclease and said double-stranded deoxyribonucleic acid polynucleotide;
(b) wherein said double-stranded deoxyribonucleic acid polynucleotide comprises a protospacer adjacent motif (PAM); and
(c) wherein said PAM comprises a sequence selected from the group consisting of SEQ ID NOs: 149-158.
